(19) United States
(12) Patent Application Publication
(10) Pub. No.: US 2008/0057575 A1
(43) Pub. Date: Mar. 6, 2008

(54) Optimizing Expression of Active Botulinum Toxin Type A

(75) Inventors: Ester G. Fernandez-Salas, Fullerton, CA (US); Lance E. Steward, Irvine, CA (US); Ronald G. Miller, Pueblo West, CO (US); Kei Roger Aoki, Coto de Caza, CA (US); Marcella A. Gilmore, Santa Ana, CA (US); Shengwen Li, Irvine, CA (US)

Correspondence Address: ALLERGAN, INC., 2525 DUPONT DRIVE, T2-7H, IRVINE, CA, 92612-1599, US

(73) Assignee: ALLERGAN, INC., Irving, CA (US)

(21) Appl. No.: 11/570,706

(22) PCT Filed: Aug. 3, 2005
(86) PCT No.: PCT/US05/27917

§ 371 Date: Sep. 7, 2007

Related U.S. Application Data
(60) Provisional application No. 60/599,121, filed on Aug. 4, 2004.

(51) Int. Cl. C12N 15/31; C12N 1/19; C12N 5/10

(52) U.S. Cl. 435/348; 435/254.2; 435/325; 536/23.7

(57) ABSTRACT

Nucleic acid molecules that comprise modified open reading frames providing increased expression of the encoded active BoNT/A in a heterologous cell, expression constructs and cells comprising such nucleic acid molecules and methods useful for expressing the encoding active BoNT/A from such nucleic acid molecules, expression constructs and cells.

[0001] This patent application claims priority pursuant to 35 U.S.C. §119(e) to U. S. provisional patent application Ser. No. 60/599132 filed Aug. 4, 2004, and U.S. provisional patent application Ser. No. 60/599121 filed Aug. 4, 2004, which are hereby incorporated by reference in their entirety.

[0002] All of the patents and publications cited in this application are hereby incorporated by reference in their entirety. All GeneBank sequence listings cited this application, as identified by their GenBank accession numbers, are available from the National Center for Biotechnological Information and are all hereby incorporated by reference in their entirety. All URL addresses cited in this application are hereby incorporated by reference in their entirety.

[0003] The ability of Clostridial toxins, such as, e.g., Botulinum neurotoxins (BoNTs), like, BoNT/A, BoNT/B, BoNT/C1, BoNT/D, BoNT/E, BoNT/F and BoNT/G, and Tetanus neurotoxin (TeNT), to inhibit neuronal transmission are being exploited in a wide variety of therapeutic and cosmetic applications, see e.g., William J. Lipham, COSMETIC AND CLINICAL APPLICATIONS OF BOTULINUM TOXIN (Slack, Inc., 2004). As an example, BOTOX® is currently approved in one or more countries for the following indications: achalasia, adult spasticity, anal fissure, back pain, blepharospasm, bruxism, cervical dystonia, essential tremor, glabellar lines or hyperkinetic facial lines, headache, hemifacial spasm, hyperactivity of bladder, hyperhidrosis, juvenile cerebral palsy, multiple sclerosis, myoclonic disorders, nasal labial lines, spasmodic dysphonia, strabismus and VII nerve disorder. In addition, BoNTs therapies are proposed for treating neuromuscular disorders, see e.g., Kei Roger Aoki et al., Method for Treating Neuromuscular Disorders and Conditions with Botulinum Toxin Types A and B, U.S. Pat. No. 6,872,397 (Mar. 29, 2005); Rheff M. Schiffman, Methods for Treating Uterine Disorders, U.S. Patent Publication No. 2004/0175399 (Sep. 9, 2004); and Richard L. Barron, Methods for Treating Ulcers and Gastroesophageal Reflux Disease, U.S. Patent Publication No. 2004/0086531 (May. 7, 2004); and Kei Roger Aoki, et al., Method for Treating Dystonia with Botulinum Toxin C to G, U.S. Pat. No. 6,319,505 (Nov. 20, 2001); eye disorders, see e.g., Eric R. First, Methods and Compositions for Treating Eye Disorders, U.S. Patent Publication No. 2004/0234532 (Nov. 25, 2004); Kei Roger Aoki et al., Botulinum Toxin Treatment for Blepharospasm, U.S. Patent Publication No. 2004/0151740 (Aug. 5, 2004); and Kei Roger Aoki et al., Botulinum Toxin Treatment for Strabismus, U.S. Patent Publication No. 2004/0126396 (Jul. 1, 2004); pain, see e.g., Kei Roger Aoki et al., Pain Treatment by Peripheral Administration of a Neurotoxin, U.S. Pat. No. 6,869,610 (Mar. 22, 2005); Stephen Donovan, Clostridial Toxin Derivatives and Methods to Treat Pain, U.S. Pat. No. 6,641,820 (Nov. 4, 2003); Kei Roger Aoki, et al., Method for Treating Pain by Peripheral Administration of a Neurotoxin, U.S. Pat. No. 6,464,986 (Oct. 15, 2002); Kei Roger Aoki and Minglei Cui, Methods for Treating Pain, U.S. Pat. No. 6,113,915 (Sep. 5, 2000); Martin Voet, Botulinum Toxin Therapy for Fibromyalgia, U.S. Patent Publication No. 2004/0062776 (Apr. 1, 2004); and Kei Roger Aoki et al., Botulinum Toxin Therapy for Lower Back Pain, U.S. Patent Publication No. 2004/0037852 (Feb. 26, 2004); muscle injuries, see e.g., Gregory F. Brooks, Methods for Treating Muscle Injuries, U.S. Pat. No. 6,423,319 (Jul. 23, 2002); headache, see e.g., Martin Voet, Methods for Treating Sinus Headache, U.S. Pat. No. 6,838,434 (Jan. 4, 2005); Kei Roger Aoki et al., Methods for Treating Tension Headache, U.S. Pat. No. 6,776,992 (Aug. 17, 2004); and Kei Roger Aoki et al., Method for Treating Headache, U.S. Pat. No. 6,458,365 (Oct. 1, 2002); cardiovascular diseases, see e.g., Gregory F. Brooks and Stephen Donovan, Methods for Treating Cardiovascular Diseases with Botulinum Toxin, U.S. Pat. No. 6,767,544 (Jul. 27, 2004); neurological disorders, see e.g., Stephen Donovan, Parkinson's Disease Treatment, U.S. Pat. No. 6,620,415 (Sep. 16, 2003); and Stephen Donovan, Method for Treating Parkinson's Disease with a Botulinum Toxin, U.S. Pat. No. 6,306,403 (Oct. 23, 2001); neuropsychiatric disorders, see e.g., Stephen Donovan, Botulinum toxin therapy for neuropsychiatric disorders, U.S. Patent Publication No. 2004/0180061 (Sep. 16, 2004); and Steven Donovan, Therapeutic Treatments for Neuropsychiatric Disorders, U.S. Patent Publication No. 2003/0211121 (Nov. 13, 2003); endocrine disorders, see e.g., Stephen Donovan, Method for Treating Endocrine Disorders, U.S. Pat. No. 6,827,931 (Dec. 7, 2004); Stephen Donovan, Method for Treating Thyroid Disorders with a Botulinum Toxin, U.S. Pat. No. 6740321 (May. 25, 2004); Kei Roger Aoki et al., Method for Treating a Cholinergic Influenced Sweat Gland, U.S. Pat. No. 6,683,049 (Jan. 27, 2004); Stephen Donovan, Neurotoxin Therapy for Diabetes, U.S. Pat. No. 6,416,765 (Jul. 9, 2002); Stephen Donovan, Methods for Treating Diabetes, U.S. Pat. No. 6,337,075 (Jan. 8, 2002); Stephen Donovan, Method for Treating a Pancreatic Disorder with a Neurotoxin, U.S. Pat. No. 6,261,572 (Jul. 17, 2001); Stephen Donovan, Methods for Treating Pancreatic Disorders, U.S. Pat. No. 6,143,306 (Nov. 7, 2000); cancers, see e.g., Stephen Donovan, Methods for Treating Bone Tumors, U.S. Pat. No. 6,565,870 (May 20, 2003); Stephen Donovan, Method for Treating Cancer with a Neurotoxin to Improve Patient Function, U.S. Pat. No. 6,368,605 (Apr. 9, 2002); Stephen Donovan, Method for Treating Cancer with a Neurotoxin, U.S. Pat. No. 6,139,845 (Oct. 31, 2000); and Mitchell F. Brin and Stephen Donovan, Methods for treating diverse cancers, U.S. Patent Publication No. 2005/0031648 (Feb. 10, 2005); otic disorders, see e.g., Stephen Donovan, Neurotoxin therapy for inner ear disorders, U.S. Pat. No. 6358926 (Mar. 19, 2002); and Stephen Donovan, Method for Treating Otic Disorders, U.S. Pat. No. 6265379 (Jul. 24, 2001); as well as other disorders, see e.g., Stephen Donovan, Use of a Clostridial Toxin to Reduce Appetite, U.S. Patent Publication No. 2004/40253274 (Dec. 16, 2004); and Howard I. Katz and Andrew M. Blumenfeld, Botulinum Toxin Dental Therapies and Procedures, U.S. Patent Publication No. 2004/0115139 (Jun. 17, 2004); Kei Roger Aoki, et al., Treatment of Neuromuscular Disorders and Conditions with Different Botulinum, U.S. Patent Publication No. 2002/0010138 (Jan. 24, 2002); and Kei Roger Aoki, et al., Use of Botulinum Toxins for Treating Various Disorders and Conditions and Associated Pain, U.S. Patent Publication No. 2004/0013692 (Jan. 22, 2004). In addition, the expected use of BoNTs, such as, e.g., BoNT/A, BoNT/B, BoNT/C1, BoNT/D and BoNT/E, BoNT/F and BoNT/G, in both therapeutic and cosmetic treatments of humans is anticipated to expand to an ever widening range of diseases and aliments that can benefit from the properties of these toxins.

[0004] The increasing use of BoNTs therapies in treating a wider range of human afflictions necessitates increasing the efficiency with which these toxins are produced. However, meeting the needs for this ever increasing demand for such BoNT treatments may become difficult. One outstanding problem is that methods previously described to express BoNTs using heterologous organisms have failed to achieve optimal levels of BoNTs in commercial quantities. This inefficiency is a problem not only because the amount of BoNTs anticipated for future therapies is increasing, but also because this inefficiency leads to higher overall production costs. Furthermore, this difficulty is exacerbated for BoNTs that require in vitro activation by an exogenous protease, such as, e.g., BoNT/A and BoNT/G, since the loss of toxin associated with the activation procedure require even larger amounts of starting material. Therefore, the poor yields using previously described methods is a significant obstacle to the overall commercial production of these BoNTs and is thus a major problem since active forms of these toxins are needed for scientific, therapeutic and cosmetic applications.

### BRIEF DESCRIPTION OF THE DRAWINGS

[0005] FIG. 1 shows a schematic of the current paradigm of neurotransmitter release and Clostridial toxin intoxication in a central and peripheral neuron. FIG. 1a shows a schematic for the neurotransmitter release mechanism of a central and peripheral neuron. The release process can be described as comprising two steps: 1) vesicle docking, where the vesicle-bound SNARE protein of a vesicle containing neurotransmitter molecules associates with the membrane-bound SNARE proteins located at the plasma membrane; and 2) neurotransmitter release, where the vesicle fuses with the plasma membrane and the neurotransmitter molecules are exocytosed. FIG. 1b shows a schematic of the intoxication mechanism for tetanus and botulinum toxin activity in a central and peripheral neuron. This intoxication process can be described as comprising four steps: 1) receptor binding, where a Clostridial toxin binds to a Clostridial receptor system and initiates the intoxication process; 2) complex internalization, where after toxin binding, a vesicle containing the toxin/receptor system complex is endocytosed into the cell; 3) light chain translocation, where multiple events are thought to occur, including, e.g., changes in the internal pH of the vesicle, formation of a channel pore comprising the H_{N} domain of Clostridial toxin heavy chain, separation of the Clostridial toxin light chain from the heavy chain, and release of the activate light chain and 4) enzymatic target modification, where the activated light chain of Clostridial toxin proteolytically cleaves its target SNARE substrates, such as, e.g., SNAP-25, VAMP or Syntaxin, thereby preventing vesicle docking and neurotransmitter release.

[0006] FIG. 2 shows a plasmid map of prokaryotic expression construct pET30b/His-BoNT/A comprising the modified open reading frame of SEQ ID NO: 110 encoding an active BoNT/A operably-linked to an amino-terminal polyhistidine binding peptide (SEQ ID NO: 111). A Enterokinase protease cleavage site is operably-linked between the polyhistidine binding peptide and BoNT/A. Abbreviations are as follows: P_{T7}, a bacteriophage T7 promoter region; 6×His, a region encoding a polyhistidine binding peptide sequence; Enterokinase, a region encoding a Enterokinase cleavage site; BoNT/A, a modified open reading frame encoding an active BoNT/A; T7 TT, a bacteriophage T7 transcription termination region; f1 origin, a bacteriophage f1 origin of replication; Kanamycin, a region encoding an aminophosphotransferase peptide that confers Kanamycin resistance; pBR322 ori, a pBR322 origin of plasmid replication region; lacI, a region encoding a lactose I peptide.

[0007] FIG. 3 shows the results of a GFP-SNAP25 activity assay used to identify constructs expressing active His-BoNT/A. His-BoNT/A candidates 1, 2, 5, 6 and 8 showed statistically significant BoNT/A enzymatic activity.

[0008] FIG. 4 shows a plasmid map of prokaryotic expression construct pET29b/BoNT/A-KHis comprising the modified open reading frame of SEQ ID NO: 112 encoding an active BoNT/A operably-linked to a carboxyl-terminal polyhistidine binding peptide (SEQ ID NO: 113). A Trypsin protease cleavage site is operably-linked between the polyhistidine binding peptide and BoNT/A. Abbreviations are as follows: P_{T7}, a bacteriophage T7 promoter region; 6×His, a region encoding a polyhistidine binding peptide sequence; Trypsin, a region encoding a Trypsin cleavage site; BoNT/A, a modified open reading frame encoding an active BoNT/A; T7 TT, a bacteriophage T7 transcription termination region; f1 origin, a bacteriophage f1 origin of replication; Kanamycin, a region encoding an aminophosphotransferase peptide that confers Kanamycin resistance; pBR322 ori, a pBR322 origin of plasmid replication region; lacI, a region encoding a lactose I peptide.

[0009] FIG. 5 shows the results of a GFP-SNAP25 activity assay used to identify constructs expressing active BoNT/A-His. BoNT/A-His candidates 2, 3, 6 and 9 showed statistically significant BoNT/A enzymatic activity.

[0010] FIG. 6 shows IMAC purified BoNT/A expressed from modified open reading frames. FIG. 6a shows an IMAC purification profile of His-BoNT/A expressed from the pET30b/His-BoNT/A expression construct comprising the modified open reading frame of SEQ ID NO: 110. Amounts of His-BoNT/A obtained averaged approximately 5 mg/L and represents a five-fold increase in protein amounts obtained from an unmodified open reading frame encoding the same active His-BoNT/A. FIG. 6b shows an IMAC purification profile of BoNT/A-KHis expressed from the pET29b/BoNT/A-KHis expression construct comprising the modified open reading frame of SEQ ID NO: 112. Amounts of BoNT/A-KHis obtained averaged approximately 12 mg/L and represents a 12-fold increase in protein amounts obtained from an unmodified open reading frame encoding the same active BoNT/A-KHis.

[0011] FIG. 7 shows a plasmid map of prokaryotic expression construct pRSETb/His-BoNT/A comprising the modified open reading frame encoding an active BoNT/A operably-linked to amino-terminal polyhistidine and Xpress™ binding peptides. An Enterokinase protease cleavage site is operably-linked between the polyhistidine and Xpress™ binding peptides and BoNT/A. Abbreviations are as follows: P_{T7}, a bacteriophage T7 promoter region; 6×His, a region encoding a polyhistidine binding peptide sequence; Xpress™, a region encoding an Xpress™ binding peptide sequence; Enterokinase, a region encoding a EnterokinaseMax™ cleavage site; BoNT/A, modified open reading frame of SEQ ID NO: 6 encoding an active BoNT/A; f1 origin, a bacteriophage f1 origin of replication; Ampicillin, a region encoding β-lactamase peptide that confers Ampicillin resistance; pBR322 ori, a pBR322 origin of plasmid replication region.

[0012] FIG. 8 shows a plasmid map of yeast expression construct pPICZ A/BoNT/A-myc-His comprising a modified open reading frame encoding an active BoNT/A operably-linked to carboxyl-terminal c-myc and polyhistidine binding peptides. Abbreviations are as follows: P_{AOX1}, an aldehyde oxidase 1 promoter region; BoNT/A, modified open reading frame of SEQ ID NO: 36 encoding an active BoNT/A; c-myc, a region encoding a c-myc binding peptide sequence; 6×His, a region encoding a polyhistidine binding peptide sequence; AOX1 TT, an aldehyde oxidase 1 transcription termination region; Zeocin™, a region encoding a Zeocin™ resistance peptide; pUC ori, a pUC origin of plasmid replication region.

[0013] FIG. 9 shows a plasmid map of yeast expression construct pMET/BoNT/A-V5-His comprising a modified open reading frame encoding an active BoNT/A operably-linked to carboxyl-terminal V5 and polyhistidine binding peptides. Abbreviations are as follows: P_{AUG1}, an alcohol oxidase promoter region; BoNT/A, modified open reading frame of SEQ ID NO: 36 encoding an active BoNT/A; V5, a region encoding a V5 binding peptide sequence; 6×His, a region encoding a polyhistidine binding peptide sequence; AUG1 TT, an alcohol oxidase transcription termination region; ADE2; ADE2 gene for auxotrophic selection; 3′ AUG1; pUC ori, a pUC origin of plasmid replication region; Ampicillin, a region encoding a β-lactamase peptide that confers Ampicillin resistance.

[0014] FIG. 10 shows a plasmid map of yeast expression construct pYES2.1/BoNT/A-V5-His comprising a modified open reading frame encoding an active BoNT/A operably-linked to carboxyl-terminal V5 and polyhistidine binding peptides. Abbreviations are as follows: P_{GAL1}, an galactose-inducible promoter region; BoNT/A, modified open reading frame of SEQ ID NO: 39 encoding an active BoNT/A; V5, a region encoding a V5 binding peptide sequence; 6×His, a region encoding a polyhistidine binding peptide sequence; cyc1 TT, an alcohol oxidase transcription termination region; pUC ori, a pUC origin of plasmid replication region; Ampicillin, a region encoding a β-lactamase peptide that confers Ampicillin resistance; URA3; URA3 gene for auxotrophic selection; 2μ origin of replication; a 2,p origin of replication; f1 origin, a bacteriophage f1 origin of replication.

[0015] FIG. 11 shows a plasmid map of baculovirus transfer construct pFastBacHT/His-BoNT/A comprising a modified open reading frame encoding an active BoNT/A operably-linked to amino-terminal polyhistidine binding peptide. A tobacco etch virus (TEV) protease cleavage site is operably-linked between the polyhistidine binding peptide and BoNT/A. Abbreviations are as follows: P_{PH}, an polyhedrin promoter region; 6×His, a region encoding a polyhistidine binding peptide sequence; TEV, a region encoding a TEV protease cleavage sequence; BoNT/A, modified open reading frame of SEQ ID NO: 63 encoding an active BoNT/A; SV40 pA, a simian virus 40 polyadenylation site; Ampicillin, a region encoding a β-lactamase peptide that confers Ampicillin resistance; pUC ori, a pUC origin of plasmid replication region; Gentamicin, a region encoding an aminophosphotransferase peptide that confers Gentamicin resistance.

[0016] FIG. 12 shows a plasmid map of baculovirus transfer construct pBACgus3/BoNT/A-His comprising a modified open reading frame encoding an active BoNT/A operably-linked to carboxyl-terminal polyhistidine binding peptide. A thrombin protease cleavage site is operably-linked between the BoNT/A and the polyhistidine binding peptide. Abbreviations are as follows: P_{PH}, an polyhedrin promoter region; gp64, a region encoding a gp64 signal peptide; BoNT/A, modified open reading frame of SEQ ID NO: 63 encoding an active BoNT/A; Thrombin, a region encoding a Thrombin protease cleavage sequence; 6×His, a region encoding a polyhistidine binding peptide sequence; pUC ori, a pUC origin of plasmid replication region; Ampicillin, a region encoding a β-lactamase peptide that confers Ampicillin resistance; f1 ori, a bacteriophage f1 origin of replication; gus, a region encoding a β-glucuronidase peptide.

[0017] FIG. 13 shows a plasmid map of insect expression construct pMT/BiP-BoNT/A-V5-His comprising a modified open reading frame encoding an active BoNT/A operably-linked to carboxyl-terminal V5 and polyhistidine binding peptides. Abbreviations are as follows: P_{MT}, an metallothionein promoter region; BipSS, a region encoding a BiP signal sequence; BoNT/A, modified open reading frame of SEQ ID NO: 60 encoding an active BoNT/A; V5, a region encoding a V5 binding peptide sequence; 6×His, a region encoding a polyhistidine binding peptide sequence; SV40 pA, a simian virus 40 polyadenylation site; pUC ori, a pUC origin of plasmid replication region; Ampicillin, a region encoding a β-lactamase peptide that confers Ampicillin resistance.

[0018] FIG. 14 shows a plasmid map of mammalian expression construct pQBI25/BoNT/A-GFP comprising a modified open reading frame encoding an active BoNT/A operably-linked to a carboxyl-terminal GFP peptide. Abbreviations are as follows: P_{CMV}, an cytomegalovirus promoter region; BoNT/A, a modified open reading frame of SEQ ID NO: 99 encoding an active BoNT/A; GFP, a region encoding a Green Florescence Protein peptide; BGH pA, a bovine growth hormone polyadenylation site; Neomycin, a region encoding an aminophosphotransferase peptide that confers Neomycin resistance; pUC ori, a pUC origin of plasmid replication region; Ampicillin, a region encoding a β-lactamase peptide that confers Ampicillin resistance.

[0019] FIG. 15 shows a plasmid map of mammalian expression construct pcDNA™6/BoNT/A-V5-His comprising a modified open reading frame encoding an active BoNT/A operably-linked to carboxyl-terminal V5 and polyhistidine binding peptides. Abbreviations are as follows: P_{CMV}, an cytomegalovirus promoter region; BoNT/A, a modified open reading frame of SEQ ID NO: 99 encoding an active BoNT/A; V5, a region encoding a V5 binding peptide sequence; 6×His, a region encoding a polyhistidine binding peptide sequence; BGH pA, a bovine growth hormone polyadenylation site; Blasticidin, a region encoding an blasticidin resistance peptide; pUC ori, a pUC origin of plasmid replication region; Ampicillin, a region encoding a β-lactamase peptide that confers Ampicillin resistance.

[0020] FIG. 16 shows a plasmid map of mammalian expression construct pSecTag2/BoNT/A-c-myc-His comprising a modified open reading frame encoding an active BoNT/A operably-linked to carboxyl-terminal c-myc and polyhistidine binding peptides. Abbreviations are as follows: P_{CMV}, an cytomegalovirus promoter region; BoNT/A, a modified open reading frame of SEQ ID NO: 99 encoding an active BoNT/A; c-myc, a region encoding a c-myc binding peptide sequence; 6×His, a region encoding a polyhistidine binding peptide sequence; BGH pA, a bovine growth hormone polyadenylation site; f1 ori, a bacteriophage f1 origin of replication; P_{SV40}, a simian virus 40 promoter region; Zeocin™, a region encoding an Zeocin™ resistance peptide; pUC ori, a pUC origin of plasmid replication region; Ampicillin, a region encoding a β-lactamase peptide that confers Ampicillin resistance.

[0021] FIG. 17 shows a plasmid map of cell-free expression construct pIVEX2.3d/BoNT/A-His comprising a modified open reading frame encoding an active BoNT/A operably-linked to a carboxyl-terminal polyhistidine binding peptide. Abbreviations are as follows: P_{T7}, a bacteriophage T7 promoter region; RBS, a ribosomal binding site region; BoNT/A, a modified open reading frame of SEQ ID NO: 3 encoding an active BoNT/A; 6×His, a region encoding a polyhistidine binding peptide sequence; T7 TT, a bacteriophage T7 transcription termination region; pUC ori, a pUC origin of plasmid replication region; Ampicillin, a region encoding a β-lactamase peptide that confers Ampicillin resistance.

### DETAILED DESCRIPTION

[0022] The present invention recognizes the need for the high-level, high quality commercial production of active Clostridial toxins using heterologous organisms. All Clostridial toxins useful for scientific, therapeutic and cosmetic applications are envisioned including, without limitation, BoNTs, such as, e.g., BoNT/A, BoNT/B, BoNT/C, BoNT/D, BoNT/E, BoNT/F and BoNT/G, and TeNT. High-level production of a Clostridial toxin is achieved by using modified nucleic acid molecules which allows for increased expression of the encoded toxin in a heterologous cell and thus higher protein yields. In aspects of the present invention, nucleic acid molecules encoding a Clostridial toxin comprise modified open reading frames designed to 1) contain codons typically present in the open reading frames of native nucleic acid molecules found in the heterologous cell selected to express that molecule; 2) contain a G+C content that more closely matches the average G+C content of open reading frames of native nucleic acid molecules found in the heterologous cell selected to express that molecule; 3) reduce polymononucleotide regions found within the open reading frame encoding an active Clostridial toxin; and/or 4) eliminate internal regulatory or structural sites found within the open reading frame encoding an active Clostridial toxin. Because a large number of production factors can influence the selection of a specific heterologous cell, nucleic acid molecules disclosed in the present specification are directed toward a wide range of prokaryotic and eukaryotic cell including, without limitation, bacteria strains, yeast strains, plant cells and cell lines derived from plants, insect cells and cell lines derived from insects and mammalian cells and cell lines derived from mammals. Aspects of the present invention also provide for expression constructs and cell compositions useful for expressing modified nucleic acid molecules disclosed in the present specification. In addition, aspects of the present invention provide methods for producing Clostridial toxins using the disclosed nucleic acid molecules.

[0023] Aspects of the present invention provide nucleic acid molecules comprising a modified open reading frame providing increased expression of the encoded active BoNT/A. The modified open reading frame includes at least one nucleotide change as compared to the unmodifed open reading frame encoding the same active BoNT/A. Increased active BoNT/A expression from a modified open reading frame in a heterologous cell is determined by comparing the expression level from an unmodified open reading frame encoding the same active BoNT/A in the same type of heterologous cell. In is envisioned that, with the exception of the modified and unmodified open reading frames, the nucleic acid molecules comprising the open reading frames are similar or identical in nature. A nucleotide change may alter a synonymous codon within the open reading frame in order to agree with the endogenous codon usage found in the heterologous cell selected to express the molecule disclosed in the present specification. Additionally, a nucleotide change may alter the G+C content within the open reading frame to better match the average G+C content of open reading frames found in endogenous nucleic acid molecules present in the heterologous cell. A nucleotide change may also alter a polymononucleotide region or an internal regulatory or structural site found within the native nucleic acid molecule. A wide variety of modified nucleic acid molecules are envisioned including, without limitation, molecules comprising a modified open reading frame providing increased expression of the encoded active BoNT/A in a prokaryotic cell; molecules comprising a modified open reading frame providing increased expression of the encoded active BoNT/A in a yeast cell; molecules comprising a modified open reading frame providing increased expression of the encoded active BoNT/A in an insect cell; molecules comprising a modified open reading frame providing increased expression of the encoded active BoNT/A in a mammalian cell; and molecules comprising a modified open reading frame providing increased expression of the encoded active BoNT/A in a cell-free extract expression system.

[0024] Other aspects of the present invention provide expression constructs comprising a nucleic acid molecule disclosed in the present specification, operably-linked to an expression vector useful for expressing BoNT/A in a heterologous cell. A wide variety of expression vectors are envisioned, including, without limitation, a prokaryotic expression construct comprising a modified open reading frame providing increased expression of the encoded active BoNT/A; a yeast expression construct comprising a modified open reading frame providing increased expression of the encoded active BoNT/A; an insect expression construct comprising a modified open reading frame providing increased expression of the encoded active BoNT/A; a mammalian expression construct comprising a modified open reading frame providing increased expression of the encoded active BoNT/A; and an expression construct for a cell-free extract expression system comprising a modified open reading frame providing increased expression of the encoded active BoNT/A.

[0025] Aspects of the present invention further provide heterologous cells comprising an expression construct disclosed in the present specification. It is envisioned that a cell can include, without limitation, a prokaryotic cell containing a prokaryotic expression construct comprising a modified open reading frame providing increased expression of the encoded active BoNT/A; a yeast cell containing a yeast expression construct comprising a modified open reading frame providing increased expression of the encoded active BoNT/A; an insect cell containing an insect expression construct comprising a modified open reading frame providing increased expression of the encoded active BoNT/A; and a mammalian cell containing a mammalian expression construct comprising a modified open reading frame providing increased expression of the encoded active BoNT/A;

[0026] Other aspects of the present invention provide methods of producing an active BoNT/A comprising the step of expressing an active BoNT/A from a nucleic acid molecule in a heterologous cell, the nucleic acid molecule comprising a modified open reading frame encoding the active BoNT/A. Aspects of these methods use nucleic acid molecules, expression constructs and cells disclosed in the present specification. It is envisioned that both cell-free and cell-based expression systems can be used to produce an active BoNT/A disclosed in the present specification according to this method.

[0027] Aspects of the present invention provide, in part, nucleic acid molecules comprising a modified open reading frame encoding active BoNT/A in a heterologous cell. As used herein, the term “open reading frame” is synonymous with “ORF” and means any nucleotide sequence that is potentially able to encode a protein, or a portion of a protein. An open reading frame usually begins with a start codon (represented as, e.g. AUG for an RNA molecule and ATG in a DNA molecule in the standard code) and is read in codon-triplets until the frame ends with a STOP codon (represented as, e.g. UAA, UGA or UAG for an RNA molecule and TAA, TGA or TAG in a DNA molecule in the standard code). As used herein, the term “codon” means a sequence of three nucleotides in a nucleic acid molecule that specifies a particular amino acid during protein synthesis; also called a triplet or codon-triplet. For example, of the 64 possible codons in the standard genetic code, two codons, GAA and GAG encode the amino acid Glutamine whereas the codons AAA and AAG specify the amino acid Lysine. In the standard genetic code three codons are stop codons, which do not specify an amino acid. As used herein, the term “synonymous codon” means any and all of the codons that code for a single amino acid. Except for Methionine (Met) and Tryptophan (Trp), amino acids are coded by two to six synonymous codons (see e.g., Table 1). For example, in the standard genetic code the four synonymous codons that code for the amino acid Alanine are GCA, GCC, GCG and GCU, the two synonymous codons that specify Glutamine are GAA and GAG and the two synonymous codons that encode Lysine are AAA and AAG (for other non-limiting examples see Table 1).

[0028] Thus in an embodiment, a modified open reading frame that encodes an active BoNT/A is changed by altering the nucleotide sequence of native Clostridia botulinum codons to better match the synonymous codons used by the heterologous cell selected to express nucleic acid molecules disclosed in the present specification. The C. botulinum strain that expresses BoNT/A exhibits a specific preference or bias for one synonymous codon over the others and there is a direct correlation between this C. botulinum strain-specific codon usage and the cellular concentration of the corresponding isoacceptor tRNA. This unequal presence of synonymous codons in a known or predicted open reading frame in an organism-, cell-, or functional class-specific manner is a phenomenon called codon bias or codon preference. Thus, it can be said that a heterologous cell has a bias for one synonymous codon over another synonymous codon, or that a heterologous cell prefers one synonymous codon over another synonymous codon. In addition, the synonymous codon to which the most abundant isoacceptor tRNA equates is often different between organisms, and, in some cases, between cells comprising different tissue types of the same organism, or between functional classes of proteins of the same organism, e.g., proteins expressed during exponential growth phase of a bacterium relative to proteins expressed during stationary growth phase of a bacterium. Different codon bias may also occur through the length of the open reading frame, such as, e.g., codons from the 5′ third of the open reading frame may use different codons relative the remaining 3′ two-thirds of the same open reading frame. For example, as mentioned above, GCA, GCC, GCG and GCU are the four synonymous codons that encode Alanine (Ala). While the most abundant Ala isoacceptor representative in C. botulinum recognizes the GCA codon, the bacterium Escherichia coli recognizes GCG, the yeast Pichia pastoris recognizes GCT and most multicellular eukaryotes appear to recognize GCC (see e.g., Table 1). Thus, certain codons that are normally used in the Clostridia botulinum strain that expresses BoNT/A may be rarely present in heterologous cells commonly used in the commercial expression of BoNT/A. Because these heterologous organisms do not produce the corresponding isoacceptor tRNAs at a concentration sufficient to support high-level BoNT/A expression, optimal protein yields are not achieved. Therefore, a modified open reading frame comprising nucleotide changes that increase the number of synonymous codons preferred by a heterologous cell will provide increased expression of the encoded active BoNT/A as compared to an unmodified open reading frame encoding the same active BoNT/A. A synonymous codon of the open reading frame can be changed by substituting a nucleotide at the third position of a codon with a different nucleotide, while still retaining the identity of the amino acid coded by that codon. As a non-limiting example, a 5′-AAATACTTA-3′ open reading frame encoding the tripeptide NH₂-lysine-tyrosine-leucine-COOH can be changed to 5′-AAGTATCTG-3′ and still encode the tripeptide NH₂-lysine-tyrosine-leucine-COOH.

[0029] Thus, in an aspect of this embodiment, at least one nucleotide change is made to a nucleic acid molecule that substitutes a codon in the open reading frame for a synonymous codon providing increased expression of the encoded active BoNT/A in a heterologous cell. In another aspect of this embodiment, a plurality of nucleotide changes are made to a nucleic acid molecule that substitutes a plurality of codons in the open reading frame for a plurality of synonymous codon providing increased expression of the encoded active BoNT/A in a heterologous cell. Thus, aspects of this embodiment can include a modified open reading frame comprising nucleotide changes that alter, e.g., at least 10 synonymous codons, at least 25 synonymous codons, at least 50 synonymous codons, at least 75 synonymous codons, at least 100 synonymous codons, at least 200 synonymous codons, at least 300 synonymous codons, at least 400 synonymous codons, at least 500 synonymous codons, at least 600 synonymous codons, at least 700 synonymous codons, at least 800 synonymous codons, at least 900 synonymous codons, at least 1000 synonymous codons, at least 1100 synonymous codons or at least 1200 synonymous codons. In other aspects of this embodiment a modified open reading frame comprises nucleotide changes that alter, e.g., at most 10 synonymous codons, at most 25 synonymous codons, at most 50 synonymous codons, at most 75 synonymous codons, at most 100 synonymous codons, at most 200 synonymous codons, at most 300 synonymous codons, at most 400 synonymous codons, at most 500 synonymous codons, at most 600 synonymous codons, at most 700 synonymous codons, at most 800 synonymous codons, at most 900 synonymous codons, at most 1000 synonymous codons, at most 1100 synonymous codons or at most 1200 synonymous codons.

[0030] In another embodiment, a modified open reading frame encoding an active BoNT/A is changed by altering the native Clostridial botulinum G+C content to better match the G+C content found in the heterologous cell selected to express nucleic acid molecules disclosed in the present specification. The average guanine and cytosine content (referred to as the G+C content) of the C. botulinum nucleic acid molecule comprising the open reading frame encoding BoNT/A is approximately 25%. This very low G+C content is in contrast to the approximately 50% G+C content of endogenous nucleic acid molecules encoding proteins found in heterologous cells commonly used in the commercial expression of BoNT/A (see e.g. Table 2). This unequal G+C content in a known or predicted open reading frame in an organism-specific manner is a phenomenon called G+C content bias or G+C content preference. Thus, it can be said that a heterologous cell has a bias for a certain G+C content level as compared to a different G+C content level, or that a heterologous cell prefers a certain G+C content level as compared to a different G+C content. The low G+C content of the open reading frame encoding BoNT/A conversely results in higher regions of adenine and thymidine content (A+T content). Higher A+T content appears to disrupt protein expression in a heterologous cell because these regions may, for example, mimic regulatory signals that could terminate transcriptional or translational expression, form secondary structures that could hinder transcriptional or translational read-through, or comprise repetitive sequences that could promote transcriptional or translational slippage. Thus, the average G+C content of the open reading frame can influence the expression levels of BoNT/A in a heterologous cell. Therefore, a modified open reading frame comprising nucleotide changes that increase the total G+C content to a level preferred by a heterologous cell will provide increased expression of the encoded active BoNT/A as compared to an unmodified open reading frame encoding the same active BoNT/A. The G+C content of the sequence can be increased by substituting an adenine or thymidine at the third position of a codon with a guanine or cytosine, while still retaining the same amino acid coded by that codon. As a non-limiting example, a 5′-AAATATTTA-3′ region in frame with the open reading frame could be changed to 5′-AAGTACCTG-3′ and still code for the tripeptide NH₂-lysine-tyrosine-leucine-COOH. Conversely, the G+C content of the sequence can be decreased by substituting a guanine or cytosine at the third position of a codon with an adenine or thymidine, while still retaining the same amino acid coded by that codon. As a non-limiting example, a 5′-AAGTACCTG-3′ open reading frame encoding NH₂-lysine-tyrosine-leucine-COOH can be changed to 5′-AAATATTTA-3′ and still encode the tripeptide NH₂-lysine-tyrosine-leucine-COOH.

[0031] Thus in an aspect of this embodiment, at least one nucleotide change is made to a nucleic acid molecule that alters the G+C content of an open reading frame providing increased expression of the encoded active BoNT/A in a heterologous cell. In another aspect of this embodiment, a plurality of nucleotide substitutions are made to a nucleic acid molecule that alters the G+C content of an open reading frame providing increased expression of the encoded active BoNT/A in a heterologous cell. Therefore, aspects of this embodiment include a modified open reading frame comprising nucleotide changes that increase the total G+C content level to, e.g., at least 30% total G+C content, at least 40% total G+C content, at least 50% total G+C content, at least 60% total G+C content or at least 70% total G+C content. Furthermore, such an open reading frame can include altering the total G+C content to any 50 consecutive nucleotides by, e.g., at least 30% total G+C content, at least 40% total G+C content, at least 50% total G+C content, at least 60% total G+C content or at least 70% total G+C content. In other aspects, a modified open reading frame can include altering the total G+C content to any 75 consecutive nucleotides by, e.g., at least 30% total G+C content, at least 40% total G+C content, at least 50% total G+C content, at least 60% total G+C content or at least 70% total G+C content. In yet other aspects, a modified open reading frame can include altering the total G+C content to any 100 consecutive nucleotides by, e.g., at least 30% total G+C content, at least 40% total G+C content, at least 50% total G+C content, at least 60% total G+C content or at least 70% total G+C content.

[0032] Other aspects of this embodiment include a modified open reading frame comprising nucleotide changes that increase the total G+C content level to, e.g., at most 30% total G+C content, at most 40% total G+C content, at most 50% total G+C content, at most 60% total G+C content or at most 70% total G+C content. Furthermore, such an open reading frame can include altering the total G+C content to any 50 consecutive nucleotides by, e.g., at most 30% total G+C content, at most 40% total G+C content, at most 50% total G+C content, at most 60% total G+C content or at most 70% total G+C content. In other aspects, a modified open reading frame can include altering the total G+C content to any 75 consecutive nucleotides by, e.g., at most 30% total G+C content, at most 40% total G+C content, at most 50% total G+C content, at most 60% total G+C content or at most 70% total G+C content. In yet other aspects, a modified open reading frame can include altering the total G+C content to any 100 consecutive nucleotides by, e.g., at most 30% total G+C content, at most 40% total G+C content, at most 50% total G+C content, at most 60% total G+C content or at most 70% total G+C content.

[0033] In another embodiment, a modified open reading frame encoding an active BoNT/A is changed by altering a polymononucleotide region. Polymononucleotide regions (i.e., polyadenine, polyA; polythymidine, polyT; polyguanine, polyG; and polycytosine, polyC) can be detrimental to protein synthesis, especially if these regions are composed of five or more nucleotides. These regions can, for example, 1) contribute to translational staling which reduces the rate of protein synthesis as well as increase the numbers of incomplete/partial peptides synthesized; and 2) participate in translational skipping where the translational apparatus becomes misaligned with the open reading frame thereby producing aberrant proteins that are, e.g., truncated or contain a different amino acid sequence due to a frame shift. A polymononucleotide region can be changed by substituting a nucleotide different from the one contained in the polymononucleotide region at the third position of a codon that interrupts the region while still maintaining the same amino acid coded by the codon. As a non-limiting example, a polyA region containing nine adenosines (i.e., 5′-AAAAAAAAA-3′) encoding the tripeptide NH₂-lysine-lysine-lysine-COOH can be eliminated by changing the sequence to 5′-AAGAAGAAG-3′ and still encode the tripeptide NH₂-lysine-lysine-lysine-COOH.

[0034] Thus in an aspect of this embodiment, at least one nucleotide change may be made to a nucleic acid molecule that alters a polymononucleotide region found in an open reading frame providing increased expression of the encoded active BoNT/A. In another aspect of this embodiment, a plurality of nucleotide changes are made to a nucleic acid molecule that alter a plurality of polymononucleotide regions in an open reading frame providing increased expression of the encoded active BoNT/A. In aspects of this embodiment an open reading frame can include, e.g., at least one nucleotide change, at least two nucleotide changes, at least three nucleotide changes, at least four nucleotide changes, at least five nucleotide changes, at least 10 nucleotide, at least 20 nucleotide, or at least 30 nucleotide changes. In other aspects of this embodiment an open reading frame can include, e.g., at most one nucleotide change, at most two nucleotide changes, at most three nucleotide changes, at most four nucleotide changes, at most five nucleotide changes, at most 10 nucleotide changes, at most 20 nucleotide changes, or at most 30 nucleotide changes.

[0035] In another embodiment, a modified open reading frame is changed by altering the nucleotide sequence that alters an internal regulatory or structural site. Internal regulatory or structural sites, include, without limitation, internal or cryptic translational start sites, RNase cleavage sites, out-of-frame stop codons, methylation sites and hairpin-loop structures Internal translational start sites can misdirected the translational apparatus to an incorrect start site, thereby increasing the number of incomplete/partial or abnormal proteins synthesized. The presence of out-of-frame stop codons in the second and third reading frames of an open reading frame can increase translational efficiency and thus protein yields. For example, if the translational apparatus shifts to a reading frame not encoding the desired protein, time, resources and energy will be wasted translating defective proteins. The presence of out-of-frame stop codons reduces the cellular efforts expended in translating these aberrant peptides. RNases are enzymes that cleave RNA molecules, thereby destroying transcripts encoding a protein of interest and reducing yields. Hairpin-loop structures can physically block or disrupt the translational apparatus, thereby preventing protein synthesis or increasing the number of incomplete/partial or abnormal peptides synthesized. An internal regulatory or structural site can be changed by substituting a nucleotide different from the one contained in the consensus sequence, altering the nucleotide identity to the consensus sequence while still maintaining the same amino acid coded by the codon present in the in-frame reading frame.

[0036] In an aspect of this embodiment, a modified open reading frame is changed by altering the nucleotide sequence that alters an internal translational start site. An internal translational start site can be changed by substituting a nucleotide different from the one contained in the consensus sequence at the third position of a codon, reducing the nucleotide identity to the consensus sequence while still maintaining the same amino acid coded by the codon. As a non-limiting example, the typical translational start site in the insect Drosophila melanogaster is 5′-ACAACCAAAATG-3′, and is present within an open reading frame would encode the peptide NH₂-threonine-threonine-lysine-methionine-COOH. This translational start site can be eliminated by changing the sequence to 5′-ACGACTAAGATG-3′ and still encode the peptide NH₂-threonine-threonine-lysine-methionine-COOH. In another aspect of this embodiment, at least one nucleotide change may be made to a nucleic acid molecule altering the consensus sequence of an internal translational start site found in an open reading frame providing increased expression of the encoded active BoNT/A. In another aspect of this embodiment, a plurality of nucleotide changes are made to a nucleic acid molecule altering one or more internal translational start sites of an open reading frame providing increased expression of the encoded active BoNT/A. Therefore, aspects of this embodiment an open reading frame can include, e.g., at least one nucleotide change, at least two nucleotide changes, at least three nucleotide changes, at least four nucleotide changes, at least five nucleotide changes or at least 10 nucleotide. In other aspects of this embodiment an open reading frame can include, e.g., at most one nucleotide change, at most two nucleotide changes, at most three nucleotide changes, at most four nucleotide changes, at most five nucleotide changes, or at most 10 nucleotide changes.

[0037] In another aspect of this embodiment, a modified open reading frame is changed by altering the nucleotide sequence that alters a RNase cleavage site. A RNase cleavage site can be changed by substituting a nucleotide different from the one contained in the consensus sequence at the third position of a codon, reducing the nucleotide identity to the consensus sequence while still maintaining the same amino acid coded by the codon. As a non-limiting example, the typical RNase E cleavage site is 5′-GGTAATTGC-3′ is present within an open reading frame and encodes the peptide NH₂-glycine-isoleucine-cysteine-COOH. This RNase cleavage site can be eliminated by changing the sequence to 5′-GGCAACTGC-3′ and still encode the peptide NH₂-threonine-threonine-lysine-methionine-COOH. In another aspect of this embodiment, at least one nucleotide change may be made to a nucleic acid molecule altering the consensus sequence of a RNase cleavage site found in an open reading frame providing increased expression of the encoded active BoNT/A. In another aspect of this embodiment, a plurality of nucleotide changes are made to a nucleic acid molecule altering one or more RNase cleavage sites of an open reading frame providing increased expression of the encoded active BoNT/A. Therefore, aspects of this embodiment an open reading frame can include, e.g., at least one nucleotide change, at least two nucleotide changes, at least three nucleotide changes, at least four nucleotide changes, at least five nucleotide changes or at least 10 nucleotide changes. In other aspects of this embodiment an open reading frame can include, e.g., at most one nucleotide change, at most two nucleotide changes, at most three nucleotide changes, at most four nucleotide changes, at most five nucleotide changes, or at most 10 nucleotide changes. A polymononucleotide region can be changed by substituting a nucleotide different from the one contained in the polymononucleotide region at the third position of a codon that interrupts the region while still maintaining the same amino acid coded by the codon.

[0038] In another aspect of this embodiment, a modified open reading frame is changed by altering the nucleotide sequence to add a stop codon to an out-of-frame reading frame. A stop codon in an out-of-frame reading frame can be added by substituting a nucleotide different from the one contained at the third position of a codon which thereby creates a stop codon in an out-of-frame codon while still maintaining the same amino acid coded by the in-frame codon. As a non-limiting example, the in-frame open reading frame of the nucleotide sequence 5′-GGCAACTGC-3′ encodes the peptide NH₂-glycine-isoleucine-cysteine-COOH. An out of frame stop codon can be added by changing the sequence to 5′-GGTAACTGC-3′ (underlined sequence) and still encode the peptide NH₂-glycine-isoleucine-cysteine-COOH. In another aspect of this embodiment, at least one nucleotide change may be made to a nucleic acid molecule adding a stop codon to an out-of-frame reading frame providing increased expression of the encoded active BoNT/A. In another aspect of this embodiment, a plurality of nucleotide changes are made to a nucleic acid molecule adding one or more stop codons to an out-of-frame reading frame providing increased expression of the encoded active BoNT/A. Therefore, aspects of this embodiment an out of frame reading frame can include, e.g., at least one nucleotide change, at least two nucleotide changes, at least three nucleotide changes, at least four nucleotide changes, at least five nucleotide changes, at least 10 nucleotide changes, at least 20 nucleotide changes, or at least 30 nucleotide changes. In other aspects of this embodiment an out of frame reading frame can include, e.g., at most one nucleotide change, at most two nucleotide changes, at most three nucleotide changes, at most four nucleotide changes, at most five nucleotide changes, at most 10 nucleotide changes, at most 20 nucleotide changes, or at most 30 nucleotide changes.

[0039] In another aspect of this embodiment, a modified open reading frame is changed by altering the nucleotide sequence that alters a hairpin-loop structure. A hairpin-loop structure can be changed by substituting a nucleotide different from the one contained in the consensus sequence at the third position of a codon, reducing the nucleotide identity to the consensus sequence while still maintaining the same amino acid coded by the codon. As a non-limiting example, the hairpin-loop structure 5′-GCTTGGCCAAGC-3′ is present within an open reading frame and encodes the peptide NH₂-alanine-tryptophan-proline-serine-COOH. This hairpin-loop structure can be eliminated by changing the sequence to 5′-GCATGGCCTAGC-3′ and still encode the peptide NH₂-alanine-tryptophan-proline-serine-COOH. In another aspect of this embodiment, at least one nucleotide change may be made to a nucleic acid molecule altering the consensus sequence of a hairpin-loop structure found in an open reading frame providing increased expression of the encoded active BoNT/A. In another aspect of this embodiment, a plurality of nucleotide changes are made to a nucleic acid molecule altering the consensus sequence of a hairpin-loop structure found in an open reading frame providing increased expression of the encoded active BoNT/A. Therefore, aspects of this embodiment an open reading frame can include, e.g., at least one nucleotide change, at least two nucleotide changes, at least three nucleotide changes, at least four nucleotide changes, at least five nucleotide changes, at least 10 nucleotide changes, at least 20 nucleotide changes, or at least 30 nucleotide changes. In other aspects of this embodiment an open reading frame can include, e.g., at most one nucleotide change, at most two nucleotide changes, at most three nucleotide changes, at most four nucleotide changes, at most five nucleotide changes, at most 10 nucleotide changes, at most 20 nucleotide changes, or at most 30 nucleotide changes.

[0040] In yet another embodiment, a modified open reading frame is changed, as compared to the open reading frame of SEQ ID NO: 2, altering synonymous codons, G+C content, polymononucleotide regions and internal regulatory or structural sites, or any combination thereof, providing increased expression of the encoded active BoNT/A.

[0041] In an aspect of this embodiment, at least one nucleotide change is made to a nucleic acid molecule that substitutes a codon in the open reading frame for a synonymous codon and alters the G+C content of an open reading frame providing increased expression of the encoded active BoNT/A. In another aspect of this embodiment, a plurality of nucleotide changes are made to a nucleic acid molecule that substitutes a plurality of codons in the open reading frame for a plurality of synonymous codons and alters the G+C content of an open reading frame providing increased expression of the encoded active BoNT/A. In another aspect of this embodiment, at least one nucleotide change is made to a nucleic acid molecule that substitutes a codon in the open reading frame for a synonymous codon and alters a polymononucleotide region found in an open reading frame providing increased expression of the encoded active BoNT/A. In another aspect of this embodiment, a plurality of nucleotide changes are made to a nucleic acid molecule that substitutes a plurality of codons in the open reading frame for a plurality of synonymous codon and alters a plurality of polymononucleotide region found in an open reading frame providing increased expression of the encoded active BoNT/A. In a further aspect of this embodiment, at least one nucleotide change is made to a nucleic acid molecule that substitutes a codon in the open reading frame for a synonymous codon and alters an internal regulatory or structural site found in an open reading frame providing increased expression of the encoded active BoNT/A. In another aspect of this embodiment, a plurality of nucleotide changes are made to a nucleic acid molecule that substitutes a plurality of codons in the open reading frame for a plurality of synonymous codons and alters a plurality of internal regulatory or structural sites found in an open reading frame providing increased expression of the encoded active BoNT/A.

[0042] In still another aspect of this embodiment, at least one nucleotide change is made to a nucleic acid molecule that substitutes a codon in the open reading frame for a synonymous codon, alters the G+C content of an open reading frame and alters a polymononucleotide region providing increased expression of the encoded active BoNT/A. In another aspect of this embodiment, a plurality of nucleotide changes are made to a nucleic acid molecule that substitutes a plurality of codons in the open reading frame for a plurality of synonymous codons, alters the G+C content of an open reading frame and alters a plurality of polymononucleotide region providing increased expression of the encoded active BoNT/A. In yet another aspect of this embodiment, at least one nucleotide change is made to a nucleic acid molecule that substitutes a codon in the open reading frame for a synonymous codon, alters the G+C content of an open reading frame and alters an internal regulatory or structural site providing increased expression of the encoded active BoNT/A. In another aspect of this embodiment, a plurality of nucleotide changes are made to a nucleic acid molecule that substitutes a plurality of codons in the open reading frame for a plurality of synonymous codons, alters the G+C content of an open reading frame and alters a plurality of internal regulatory or structural sites providing increased expression of the encoded active BoNT/A.

[0043] In an aspect of this embodiment, at least one nucleotide change is made to a nucleic acid molecule that substitutes a codon in the open reading frame for a synonymous codon, alters the G+C content of an open reading frame, alters a polymononucleotide region and alters an internal regulatory or structural site providing increased expression of the encoded active BoNT/A. In another aspect of this embodiment, a plurality of nucleotide changes are made to a nucleic acid molecule that substitutes a plurality of codons in the open reading frame for a plurality of synonymous codons, alters the G+C content of an open reading frame, alters a plurality of polymononucleotide region and alters a plurality of internal regulatory or structural sites providing increased expression of the encoded active BoNT/A.

[0044] Non-limiting examples of nucleic acid molecules disclosed in the present specification include the nucleic acid sequence molecules comprising SEQ ID NO: 3 through SEQ ID NO: 99, SEQ ID NO: 110, SEQ ID NO: 112 and SEQ ID NO: 122 through SEQ ID NO: 125.

[0045] It is envisioned that any of a variety of additional nucleotide modifications can be done to assist in the making and using of a nucleic acid molecule and the active BoNT/A encoded by such molecules. In one embodiment, a nucleic acid molecule disclosed in the present specification can be modified to add at least one nucleotide sequence region comprising a restriction endonuclease binding site. In another aspect of this embodiment, a molecule disclosed in the present specification can include a plurality of restriction endonuclease binding sites. Therefore, aspects of this embodiment can include a nucleic acid molecule that includes a nucleic acid region comprising one or more restriction endonuclease binding sites, two or more restriction endonuclease sites, three or more restriction endonuclease sites, four or more restriction endonuclease sites, or five or more restriction endonuclease enzyme sites. It is envisioned that the location of a nucleic acid region comprising a restriction endonuclease binding site can be at the 5′ end of a molecule, the 3′ end of the molecule, within the molecule, or any combination thereof. In another aspect of this embodiment, regions comprising restriction endonuclease sites are added to both the 5′ and 3′ ends of the open reading frame contained in a nucleic acid molecule. In another aspect of this embodiment, restriction endonuclease sites flank each end of an open reading frame encoding the BoNT/A of SEQ ID NO: 1. It is envisioned that any of a wide variety of restriction endonuclease binding sites can be used with nucleic acid molecules disclosed in the present specification. The selection, making and use of restriction endonuclease binding sites are routine procedures well within the scope of one skilled in the art and from the teaching herein.

[0046] In another embodiment, nucleic acid molecules disclosed in the present specification can include at least one nucleotide change that eliminates a restriction endonuclease binding site from within an open reading frame. In another aspect of this embodiment, a molecule disclosed in the present specification can include a plurality of nucleotide substitutions that eliminate a restriction endonuclease binding site from within an open reading frame. Therefore, aspects of this embodiment can include a nucleic acid molecule that alters the recognition sequence of a restriction endonuclease binding site found within an open reading frame by one or more nucleotides, two or more nucleotides, three or more nucleotides, or four or more nucleotides. A restriction endonuclease binding site can be altered by substituting a nucleotide different from the one contained in the palindrome recognition sequence of that enzyme at the third position of a codon that interrupted the site while still maintaining the same amino acid coded by the codon. As a non-limiting example, an EcoRI recognition site of 5′-GAATTC-3′, found in the open reading frame, encoding for the dipeptide NH₂-glutamate-phenylalanine-COOH can be changed to 5′-GAGTTC-3′ to eliminate the EcoRI recognition site and still code for the dipeptide NH₂-glutamate-phenylalanine-COOH. In yet another aspect of this embodiment, a nucleic acid molecule disclosed in the present specification can include the elimination of at least one restriction endonuclease site from an open reading frame. In yet another aspect of this embodiment, a molecule disclosed in the present specification can include the elimination of a plurality of restriction endonuclease binding sites from an open reading frame. Thus, aspects of this embodiment can eliminate one or more restriction endonuclease binding sites from an open reading frame, two or more restriction endonuclease binding sites from an open reading frame, three or more restriction endonuclease binding sites from an open reading frame, or four or more restriction endonuclease binding sites from an open reading frame.

[0047] In yet another embodiment, nucleic acid molecules disclosed in the present specification can include at least one nucleic acid region encoding a binding peptide. Such a binding peptide is operably-linked in-frame to an open reading frame encoding a BoNT/A as a fusion protein. In another aspect of this embodiment, a nucleic acid molecule disclosed in the present specification can include a plurality of nucleic acid regions encoding multiple operably-linked binding peptides. Therefore, aspects of this embodiment can include a nucleic acid molecule including a nucleic acid region encoding one or more operably-linked binding peptides, two or more operably-linked binding peptides, three or more operably-linked binding peptides, four or more operably-linked binding peptides, or five or more operably-linked binding peptides. In another aspect of this embodiment, nucleic acid regions comprising multiple binding peptides can encode multiple copies of the same binding peptide, different binding peptides, or any combination thereof. The location of a nucleic acid region encoding a binding peptide may be in various positions, including, without limitation, before the amino terminus of the BoNT/A, within the BoNT/A, or after the carboxyl terminus of the BoNT/A and a binding peptide. Examples of binding peptides that can be encoded by a nucleic acid region disclosed in the present specification include, without limitation, epitope-binding peptides such as FLAG, Express™, human Influenza virus hemagluttinin (HA), human p62^{c-Myc} protein (c-MYC), Vesicular Stomatitis Virus Glycoprotein (VSV-G), glycoprotein-D precursor of Herpes simplex virus (HSV), V5, and AU1; affinity-binding peptides such as polyhistidine (HIS), streptavidin binding peptide (strep), and biotin; and peptide-binding domains such as the glutathione binding domain of glutathione-S-transferase, the calmodulin binding domain of the calmodulin binding protein, the S-peptide binding domain and the maltose binding domain of the maltose binding protein. Non-limiting examples of specific protocols for selecting, making and using an appropriate binding peptide are described in, e.g., MOLECULAR CLONING A LABORATORY MANUAL (Joseph Sambrook & David W. Russell eds., Cold Spring Harbor Laboratory Press, 3^{rd} ed. 2001); ANTIBODIES: A LABORATORY MANUAL (Edward Harlow & David Lane, eds., Cold Spring Harbor Laboratory Press, 2^{nd} ed. 1998); and USING ANTIBODIES: A LABORATORY MANUAL: PORTABLE PROTOCOL NO. I (Edward Harlow & David Lane, Cold Spring Harbor Laboratory Press, 1998), which are hereby incorporated by reference. In addition, non-limiting examples of binding peptides as well as well-characterized reagents, conditions and protocols are readily available from commercial vendors that include, without limitation, BD Biosciences-Clontech, Palo Alto, Calif.; BD Biosciences Pharmingen, San Diego, Calif.; Invitrogen, Inc, Carlsbad, Calif.; QIAGEN, Inc., Valencia, Calif.; and Stratagene, La Jolla, Calif. These protocols are routine procedures within the scope of one skilled in the art and from the teaching herein.

[0048] In yet another embodiment, a nucleic acid molecule disclosed in the present specification can include at least one nucleic acid region encoding a protease cleavage site. Such a protease cleavage site is operably-linked in-frame to an open reading frame encoding an active BoNT/A and a binding peptide as a fusion protein. In another aspect of this embodiment, a molecule disclosed in the present specification can comprise a plurality of nucleic acid regions encoding multiple protease cleavage sites. It is further envisioned that in a molecule containing two or more nucleic acid regions, these regions may encode the same protease cleavage sites or may encode for different protease cleavage sites. The location of the nucleic acid region encoding the cleavage site may be in various positions, including, without limitation, between a binding peptide and the amino terminus of the active BoNT/A or between the carboxyl terminus of the active BoNT/A and a binding peptide element. Examples of protease cleavage sites that can be encoded by a nucleic acid region disclosed in the present specification include, without limitation, an enterokinase cleavage site, a thrombin cleavage site, a Factor Xa cleavage site, a human rhinovirus 3C protease cleavage site, a tobacco etch virus (TEV) protease cleavage site, a dipeptidyl aminopeptidase cleavage site and a small ubiquitin-like modifier (SUMO)/ubiquitin-like protein-1(ULP-1) protease cleavage site. Non-limiting examples of protease cleavage site as well as well-characterized reagents, conditions and protocols are readily available from commercial vendors that include, without limitation, BD Biosciences-Clontech, Palo Alto, Calif.; BD Biosciences Pharmingen, San Diego, Calif.; Invitrogen, Inc, Carlsbad, Calif.; QIAGEN, Inc., Valencia, Calif.; and Stratagene, La Jolla, Calif. The selection, making and use of an appropriate protease cleavage site are routine procedures within the scope of one skilled in the art and from the teaching herein.

[0049] It is envisioned that any of a variety of means can be used to identify appropriate nucleotides to change in order to make a modified open reading frame providing increased expression of an active BoNT/A. Appropriate nucleotide changes can be identified manually using published codon usage tables, see e.g., Codon Usage Database, supra, (2004), or codon usage tables developed by one skilled in the art. In addition, computer programs designed to assist in the selection of nucleotide changes. Non-limiting examples of such software include eCodonOpt, Gregory L. Moore and Costas D. Maranas, eCodonOpt: A Systematic Computational Framework for Optimizing Codon Usage in Directed Evolution Experiments, 30(11) Nucleic Acids Res. 2407-2416 (2002); DNA Works, see, e.g., David M. Hoover and Jacek Lubkowski, DNAWorks: An Automated Method for Designing Oligonucleotides for PCR-Based Gene Synthesis, 30(10) Nucleic Acids Res. e43 (2002); DNA2.0, see, e.g., Claes Gustafsson et al., Codon Bias and Heterologous Protein Expression, 22(7) Trends Biotechnol. 346-353 (2004); GeMS, see, e.g., Sarah J. Kodumal et al., Total Synthesis of Long DNA Sequences: Synthesis of a Contiguous 32-Kb Polyketide Synthase Gene Cluster, 101(44) Proc. Natl. Acad. Sci. U. S. A. 15573-15578 (2004); CAD PAM, see, e.g., Lance Stewart and Alex B. Burgin, supra, 2005; and Gene Composer, see, e.g., Lance Stewart and Alex B. Burgin, supra, 2005. In addition, publicly available internet sites useful for identifying codon bias are available, such as, Graphical Codon User Analyzer at gcua.schoedl.de, see, e.g., Markus Fuhrmann et al., Monitoring Dynamic Expression of Nuclear Genes in Chlamydomonas Reinhardtii by Using a Synthetic Luciferase Reporter Gene, 55(6) Plant Mol. Biol. 869-881 (2004); and UpGene at URL address vectorcore.pitt.edu/upgene/upgene.html, see, e.g., Wentao Gao et al., UpGene: Application of a Web-based DNA Codon Optimization Algorithm, 20 BIOTECHNOL. PROG. 443-448, (2004). Alternatively, a variety of commercial vendors provide nucleotide optimization services including, but not limited, to Aptagen, Inc. (Herndon, Va.); BlueHeron® Biotechnology (Bothell, Wash.); deCODE Biostructures, Inc. (Bainbridge Island, Wash.); DNA 2.0 (Menlo Park, Calif.); Entelechon, GmbH. (Regensburg, Germany); Genscript Corp. (Piscataway, N.J.); Modular Genetics, Inc. (Woburn, Mass.); and QIAGEN, Inc. (Valencia, Calif.). The identification of appropriate nucleotide changes to make in a modified open reading frame disclosed in the present specification is a routine procedure within the scope of one skilled in the art and from the teachings herein.

[0050] A variety of methods can be used to make a nucleic acid molecule comprising a modified open reading frame disclosed in the present specification, see, e.g., Lance Stewart and Alex B. Burgin, supra, 2005. Non-limiting examples of methods include, oligonucleotide ligation methods, in vivo repair methods and PCR-based methods. The synthesis of nucleic acid molecules is a routine procedure within the scope of one skilled in the art and from the teachings herein.

[0051] Nucleic acid synthesis by sequential assembly of complementary oligonucleotides is a solid phase method involving the sequential hybridization of overlapping complementary oligonucleotides to a starting oligonucleotide that is chemically coupled to an insert support, see, e.g., Zdenek Hostomsky and Jiri Smrt, Solid-phase assembly of DNA duplexes from synthetic oligonucleotides, 18 Nucleic Acids Symp Ser. 241-244 (1987); and K L. Beattie and R. F. Fowler, Solid-phase gene assembly, 352(6335) Nature 548-549 (1991). In this oligonucleotide ligation method, oligonucleotide building blocks of approximately 30 nucleotides in length that correspond to the top and bottom strands of the entire gene are individually denatured and purified by denaturing polyacrylamide gel electrophoresis. These purified oligonucleotides are phosphorylated at the 5′ end, divided into subgroups and then hybridized to form subassemblies on the solid-phase support. Sequential rounds of subassembly hybridizations to the solid-phase support extend the attached DNA molecule until the full-length gene is constructed.

[0052] Nucleic acid synthesis by the FokI method utilizes the E. coli in vivo repair mechanism of DNA synthesis to construct a synthetic gene from oligonucleotides, see e.g., Wlodek Mandecki & Timothy J. Boiling, Fowl Method of Gene Synthesis, 68(1) GENE 101-107, (1988), The method is based on the observation that large (approx. 100 bp long) inserts can be cloned into a plasmid using a technique of oligodeoxynucleotide (oligo)-directed double-strand break repair. The method involves transforming a denatured mixture of oligonucleotides of approximately 40 to 90 nucleotides in length and a linearized plasmid into E. coli. The oligonucleotides are designed with terminal sequences which contain a FokI restriction endonuclease site and complement the ends of the linearized plasmid, which also has sites for FokI. The nucleotide (nt) sequences are inserted between the two FokI sites of the plasmid. FokI is a class IIs endonuclease which makes a staggered double strand break at a site 9 and 13 nucleotides away from its recognition site. Upon cleavage of the plasmid DNA with FokI, a restriction fragment is liberated that by design contains unique four nucleotide FokI 5′-overhang sequences that can serve as cohesive ends for subsequent assembly of larger fragments of synthetic DNA until the gene of interest is constructed.

[0053] Nucleic acid synthesis by polymerase cycling assembly (PCA) or assembly PCR uses the polymerase chain reaction to construct a gene from oligonucleotides instead of methods involving the ligation of overlapping oligonucleotide, see e.g., Patrick J. Dillon & Craig A. Rosen, A Rapid Method for the Construction of Synthetic Genes Using the Polymerase Chain Reaction, 9(3) BIOTECHNIQUES 298-300, (1990); and Willem P. Stemmer et al., Single-Step Assembly of a Gene and Entire Plasmid from Large Numbers of Oligodeoxyribonucleotides, 164(1) GENE 49-53, (1995). In this method, overlapping, complementary oligonucleotides of approximately 40 to 60 nucleotides in length that correspond to the top and bottom strands of the entire gene are pooled and subjected to multiple cycles of denaturation, renaturation and polymerization. The resulting PCR products are then subjected to PCR amplification using outside flanking primers containing restriction endonuclease sites that facilitate cloning of the final PCR product.

[0054] Alternatively, a variety of commercial vendors provide nucleic acid synthesis services through the use of high throughput gene synthesis platforms including, but not limited, to Aptagen, Inc. (Herndon, Va.); BlueHeron® Biotechnology (Bothell, Wash.); DNA 2.0 (Menlo Park, Calif.); Entelechon, GmbH. (Regensburg, Germany); Genscript Corp. (Piscataway, N.J.); Modular Genetics, Inc. (Woburn, Mass.); and QIAGEN, Inc. (Valencia, Calif.). A method of nucleic acid synthesis is illustrated in Example 2. The synthesis of a modified open reading frame disclosed in the present specification is a routine procedure within the scope of one skilled in the art and from the teachings herein.

[0055] Seven antigenically-distinct types of Botulinum toxins (BoNTs) have been identified by investigating botulism outbreaks in man (BoNT/A, /B, /E and /F), animals (BoNT/C1 and /D), or isolated from soil (BoNT/G). BoNTs possess approximately 35% amino acid identity with each other and share the same functional domain organization and overall structural architecture. The amino acid sequences of eight Clostridial toxin serotypes have been derived from the corresponding genes, see, e.g., Niemann, Molecular Biology of Clostridial Neurotoxins, 303-348 (Sourcebook of Bacterial Protein Toxins, Alouf and Freer, Eds. Academic Press, 1991). It is recognized by those of skill in the art that within each type of Clostridial toxin there can be subtypes that differ somewhat in their amino acid sequence, and also in the nucleic acids encoding these proteins. For example, there are presently four BoNT/A subtypes, BoNT/A1, BoNT/A2, BoNT/A3 and BoNT/A4, with specific subtypes showing approximately 89% amino acid identity when compared to another BoNT/A subtype. While all seven BoNT serotypes have similar structure and pharmacological properties, each also displays heterogeneous bacteriological characteristics. In contrast, tetanus toxin (TeNT) is produced by a uniform group of C. tetani. Two other species of clostridia, C. baratii and C. butyricum, also produce toxins similar to BoNT/F and BoNT/E, respectively.

[0056] Clostridia toxins (CoNTs) are each translated as a single chain polypeptide of approximately 150 kDa that is subsequently cleaved by proteolytic scission within a disulphide loop by bacterial or tissue proteases. This posttranslational processing yields a di-chain molecule comprising an approximately 50 kDa light chain (LC) and an approximately 100 kDa heavy chain (HC) held together by a single disulphide bond and noncovalent interactions. Each mature di-chain molecule comprises three functionally distinct domains: 1) an enzymatic domain located in the LC that includes a metalloprotease region containing a zinc-dependent endopeptidase activity which specifically targets core components of the neurotransmitter release apparatus; 2) a translocation domain contained within the amino-terminal half of the HC (H_{N}) that facilitates release of the toxin from intracellular vesicles into the cytoplasm of the target cell; and 3) a binding domain found within the carboxyl-terminal half of the HC (H_{C}) that determines the binding activity and binding specificity of the toxin to the receptor complex located at the surface of the target cell.

[0057] The binding, translocation and enzymatic activity of these three functional domains are all necessary for toxicity. While all details of this process are not yet precisely known, the overall cellular intoxication mechanism whereby CoNTs enter a neuron and inhibit neurotransmitter release is similar, regardless of type. Although the applicants have no wish to be limited by the following description, the intoxication mechanism can be described as comprising at least four steps: 1) receptor binding, 2) complex internalization, 3) light chain translocation, and 4) enzymatic target modification (see FIG. 1). The process is initiated when the H_{C =l domain of a CoNT binds to CoNT-specific receptor complex located on the plasma membrane surface of a target cell. The binding specificity of a receptor complex is thought to be achieved, in part, by specific combinations of gangliosides and protein receptors that appear to distinctly comprise each Clostridial toxin receptor complex. Once bound, the CoNT/receptor complexes are internalized by endocytosis and the internalized vesicles are sorted to specific intracellular routes. The translocation step appears to be triggered by the acidification of the vesicle compartment. This process seems to initiate two important pH-dependent structural rearrangements that increase hydrophobicity and promote enzymatic activation of the toxin. Once activated, light chain endopeptidase of the toxin is released from the intracellular vesicle into the cytosol where it specifically targets one of three known core components of the neurotransmitter release apparatus. These core proteins, vesicle-associated membrane protein (VAMP)/synaptobrevin, synaptosomal-associated protein of} 25 kDa (SNAP-25) and Syntaxin, are necessary for synaptic vesicle docking and fusion at the nerve terminal and constitute members of the soluble N-ethylmaleimide-sensitive factor-attachment protein-receptor (SNARE) family. BoNT/A and BoNT/E cleave SNAP-25 in the carboxyl-terminal region, releasing a nine or twenty-six amino acid segment, respectively, and BoNT/C1 also cleaves SNAP-25 near the carboxyl-terminus. The botulinum serotypes BoNT/B, BoNT/D, BoNT/F and BoNT/G, and tetanus toxin, act on the conserved central portion of VAMP, and release the amino-terminal portion of VAMP into the cytosol. BoNT/C1 cleaves syntaxin at a single site near the cytosolic membrane surface. The selective proteolysis of synaptic SNAREs accounts for the block of neurotransmitter release caused by Clostridial toxins in vivo. The SNARE protein targets of Clostridial toxins are common to exocytosis in a variety of non-neuronal types; in these cells, as in neurons, light chain peptidase activity inhibits exocytosis, see, e.g., Yann Humeau et al., How Botulinum and Tetanus Neurotoxins Block Neurotransmitter Release, 82(5) Biochimie. 427-446 (2000); Kathryn Turton et al., Botulinum and Tetanus Neurotoxins: Structure, Function and Therapeutic Utility, 27(11) Trends Biochem. Sci. 552-558. (2002); M. Zouhair Atassi, Basic and Therapeutic Aspects of Botulinum and Tetanus Toxins, (Dirk W. Dressler & Joseph J. Jankovic eds., 2003); Giovanna Lalli et al., The Journey of Tetanus and Botulinum Neurotoxins in Neurons, 11 (9) Trends Microbiol. 431-437, (2003) which are hereby incorporated by reference.

[0058] Aspects of the present invention provide, in part, an active BoNT/A. As used herein, the term “active BoNT/A” means any protein, or fragment thereof, that can execute the overall cellular mechanism whereby BoNT/A enters a neuron and inhibits neurotransmitter release and encompasses the binding of a BoNT/A to a low or high affinity receptor complex, the internalization of the toxin/receptor complex, the translocation of the BoNT/A light chain into the cytoplasm and the enzymatic modification of a BoNT/A substrate. Thus, active BoNT/A encompass without limitation, naturally occurring active BoNT/A variants, such as, e.g., active BoNT/A isoforms and BoNT/A subtypes; non-naturally occurring active BoNT/A variants, such as, e.g., conservative BoNT/A variants, non-conservative BoNT/A variants, BoNT/A chimeric variants and active BoNT/A fragments thereof, or any combination thereof. As used herein, the term “BoNT/A variant,” whether naturally-occurring or non-naturally-occurring, means an active BoNT/A that has at least one amino acid change from the corresponding region of SEQ ID NO: 1 and can be described in percent identity to the corresponding region of SEQ ID NO: 1. As a non-limiting example, an active BoNT/A variant comprising amino acids 1-1296 of SEQ ID NO: 1 will have at least one amino acid difference, such as, e.g., an amino acid substitution, deletion or addition, as compared to the amino acid region 1-1296 of SEQ ID NO: 1. As another non-limiting example, an BoNT/A variant comprising amino acids 15-1290 of SEQ ID NO: 1 will have at least one amino acid difference, such as, e.g., an amino acid substitution, deletion or addition, as compared to the amino acid region 15-1290 of SEQ ID NO: 1.

[0059] Any of a variety of sequence alignment methods can be used to determine percent identity, including, without limitation, global methods, local methods and hybrid methods, such as, e.g., segment approach methods. Protocols to determine percent identity are routine procedures within the scope of one skilled in the art and from the teaching herein.

[0060] Global methods align sequences from the beginning to the end of the molecule and determine the best alignment by adding up scores of individual residue pairs and by imposing gap penalties. Non-limiting methods include, e.g., CLUSTAL W, see, e.g., Julie D. Thompson et al., CLUSTAL W: improving the sensitivity of progressive multiple sequence alignment through sequence weighting, position-specific gap penalties and weight matrix choice, 22(22) Nucleic Acids Research 4673-4680 (1994); and iterative refinement, see, e.g., Osamu Gotoh, Significant improvement in accuracy of multiple protein sequence alignments by iterative refinement as assessed by reference to structural alignments, 264(4) J. Mol. Biol. 823-838 (1996).

[0061] Local methods align sequences by identifying one or more conserved motifs shared by all of the input sequences. Non-limiting methods include, e.g., Match-box, see, e.g., Eric Depiereux and Ernest Feytmans, Match-box: a fundamentally new algorithm for the simultaneous alignment of several protein sequences, 8(5) CABIOS 501-509 (1992); Gibbs sampling, see, e.g., C. E. Lawrence et al., Detecting subtle sequence signals: a gibbs sampling strategy for multiple alignment, 262(5131) Science 208-214 (1993); Align-M, see, e.g., Ivo Van Walle et al., Align-m—a new algorithm for multiple alignment of highly divergent sequences, 20(9) Bioinformatics,:1428-1435 (2004).

[0062] Hybrid methods combine functional aspects of both global and local alignment methods. Non-limiting methods include, e.g., segment-to-segment comparison, see, e.g., Burkhard Morgenstern et al., Multiple DNA and protein sequence alignment based on segment-to-segment comparison, 93(22) Proc. Natl. Acad. Sci. U.S.A. 12098-12103 (1996); T-Coffee, see, e.g., Cédric Notredame et al., T-Coffee: a novel algorithm for multiple sequence alignment, 302(1) J. Mol. Biol. 205-217 (2000); MUSCLE, see, e.g., Robert C. Edgar, MUSCLE: Multiple sequence alignment with high score accuracy and high throughput, 32(5) Nucleic Acids Res. 1792-1797 (2004); and DIALIGN-T, see, e.g., Amarendran R Subramanian et al., DIALIGN-T: An improved algorithm for segment-based multiple sequence alignment, 6(1) BMC Bioinformatics 66 (2005).

[0063] As used herein, the term “naturally occurring BoNT/A variant” means any active BoNT/A produced without the aid of any human manipulation, including, without limitation, BoNT/A isoforms produced from alternatively-spliced transcripts and BoNT/A isoforms produced by spontaneous mutation. As used herein, the term “non-naturally occurring BoNT/A variant” means any active BoNT/A produced with the aid of human manipulation, including, without limitation, active BoNT/A produced by genetic engineering using random mutagenesis or rational designed and active BoNT/A produced by chemical synthesis.

[0064] As used herein, the term “conservative BoNT/A variant” means an active BoNT/A that has at least one amino acid substituted by another amino acid or an amino acid analog that has at least one property similar to that of the original amino acid. Examples of properties include, without limitation, similar size, topography, charge, hydrophobicity, hydrophilicity, lipophilicity covalent-bonding capacity, hydrogen-bonding capacity, a physicochemically property, of the like, or any combination thereof. A conservative BoNT/A variant can function in substantially the same manner as the active BoNT/A on which the conservative BoNT/A variant is based, and can be substituted for the active BoNT/A in any aspect of the present invention. A conservative BoNT/A variant may substitute one or more amino acids, two or more amino acids, three or more amino acids, four or more amino acids, five or more amino acids, ten or more amino acids, 20 or more amino acids, 30 or more amino acids, 40 or more amino acids, 50 or more amino acids, 100 or more amino acids, 200 or more amino acids, 300 or more amino acids, 400 or more amino acids, or 500 or more amino acids from the active BoNT/A on which the conservative BoNT/A variant is based. A conservative BoNT/A variant can also substitute at least 10 contiguous amino acids, at least 15 contiguous amino acids, at least 20 contiguous amino acids, or at least 25 contiguous amino acids from the active BoNT/A on which the conservative BoNT/A variant is based, that possess at least 50% amino acid identity, 65% amino acid identity, 75% amino acid identity, 85% amino acid identity or 95% amino acid identity to the active BoNT/A on which the conservative BoNT/A variant is based.

[0065] As used herein, the term “non-conservative BoNT/A variant” means an active BoNT/A in which 1) at least one amino acid is deleted from the active BoNT/A on which the non-conservative BoNT/A variant is based; 2) at least one amino acid added to the active BoNT/A on which the non-conservative BoNT/A variant is based; or 3) at least one amino acid is substituted by another amino acid or an amino acid analog that does not share any property similar to that of the original amino acid. A non-conservative BoNT/A variant can function in substantially the same manner as the active BoNT/A on which the non-conservative BoNT/A variant is based, and can be substituted for the active BoNT/A in any aspect of the present invention. A non-conservative BoNT/A variant can delete one or more amino acids, two or more amino acids, three or more amino acids, four or more amino acids, five or more amino acids, and ten or more amino acids from the active BoNT/A on which the non-conservative BoNT/A variant is based. A non-conservative BoNT/A variant can add one or more amino acids, two or more amino acids, three or more amino acids, four or more amino acids, five or more amino acids, and ten or more amino acids to the active BoNT/A on which the non-conservative BoNT/A variant is based. A non-conservative BoNT/A variant may substitute one or more amino acids, two or more amino acids, three or more amino acids, four or more amino acids, five or more amino acids, ten or more amino acids, 20 or more amino acids, 30 or more amino acids, 40 or more amino acids, 50 or more amino acids, 100 or more amino acids, 200 or more amino acids, 300 or more amino acids, 400 or more amino acids, or 500 or more amino acids from the active BoNT/A on which the non-conservative BoNT/A variant is based. A non-conservative BoNT/A variant can also substitute at least 10 contiguous amino acids, at least 15 contiguous amino acids, at least 20 contiguous amino acids, or at least 25 contiguous amino acids from the active BoNT/A on which the non-conservative BoNT/A variant is based, that possess at least 50% amino acid identity, 65% amino acid identity, 75% amino acid identity, 85% amino acid identity or 95% amino acid identity to the active BoNT/A on which the non-conservative BoNT/A variant is based.

[0066] As used herein, the term “BoNT/A chimeric variant” means a molecule comprising at least a portion of an active BoNT/A and at least a portion of at least one other protein to form an active BoNT/A. Such BoNT/A chimeric molecules are described in, e.g., Clifford C. Shone et al., Recombinant Toxin Fragments, U.S. Pat. No. 6,461,617 (Oct. 8, 2002); Keith A. Foster et al., Clostridial Toxin Derivatives Able To Modify Peripheral Sensory Afferent Functions, U.S. Pat. No. 6,395,513 (May 28, 2002); Wei-Jin Lin et al., Neurotoxins with Enhanced Target Specificity, US 2002/0137886 (Sep. 26, 2002); Keith A. Foster et al., Inhibition of Secretion from Non-neural Cells, US 2003/0180289 (Sep. 25, 2003); J. Oliver Dolly et al., Activatable Recombinant Neurotoxins, WO 2001/014570 (Mar. 1, 2001); Clifford C. Shone et al., Recombinant Toxin Fragments, WO 2004/024909 (Mar. 25, 2004); and Keith A. Foster et al., Re-targeted Toxin Conjugates, WO 2005/023309 (Mar. 17, 2005).

[0067] It is also envisioned that any of a variety of active BoNT/A fragments can be useful in aspects of the present invention with the proviso that these active fragments can execute the overall cellular mechanism whereby an active BoNT/A proteolytically cleaves a substrate. Thus, aspects of this embodiment can include active BoNT/A fragments having a length of, e.g., at least 300 amino acids, at least 400 amino acids, at least 500 amino acids, at least 600 amino acids, at least 700 amino acids, at least 800 amino acids, at least 900 amino acids, at least 1000 amino acids, at least 1100 amino acids and at least 1200 amino acids. Other aspects of this embodiment, can include active BoNT/A fragments having a length of, e.g., at most 300 amino acids, at most 400 amino acids, at most 500 amino acids, at most 600 amino acids, at most 700 amino acids, at most 800 amino acids, at most 900 amino acids, at most 1000 amino acids, at most 1100 amino acids and at most 1200 amino acids.

[0068] Thus, in an embodiment, a nucleic acid molecule comprising a modified open reading frame disclosed in the present specification encodes an active BoNT/A. Other aspects of this embodiment include, without limitation, naturally occurring BoNT/A variants, such as, e.g., BoNT/A isoforms, non-naturally occurring BoNT/A variants, such as, e.g., conservative BoNT/A variants, non-conservative BoNT/A variants and active BoNT/A fragments, or any combination thereof. In another embodiment, a nucleic acid molecule comprising a modified open reading frame disclosed in the present specification encodes an active BoNT/A comprising SEQ ID NO:1. Other aspects of this embodiment include, without limitation, naturally occurring BoNT/A variants of SEQ ID NO: 1, such as, e.g., BoNT/A isoforms of SEQ ID NO: 1, non-naturally occurring BoNT/A variants of SEQ ID NO: 1, such as, e.g., conservative BoNT/A variants of SEQ ID NO: 1, non-conservative BoNT/A variants of SEQ ID NO: 1 and active BoNT/A fragments of SEQ ID NO: 1, or any combination thereof.

[0069] In still other aspects of this embodiment, an active BoNT/A has, e.g., at least 70% amino acid identity with SEQ ID NO:1, at least 75% amino acid identity with the SEQ ID NO:1, at least 80% amino acid identity with SEQ ID NO:1, at least 85% amino acid identity with SEQ ID NO:1, at least 90% amino acid identity with SEQ ID NO:1 or at least 95% amino acid identity with SEQ ID NO:1. In yet other aspects of this embodiment, an active BoNT/A has, e.g., at most 70% amino acid identity with SEQ ID NO:1, at most 75% amino acid identity with the SEQ ID NO:1, at most 80% amino acid identity with SEQ ID NO:1, at most 85% amino acid identity with SEQ ID NO:1, at most 90% amino acid identity with SEQ ID NO:1 or at most 95% amino acid identity with SEQ ID NO:1.

[0070] In other aspects of this embodiment, an active BoNT/A has, e.g., at most one, two, three, four, five, six, seven, eight, nine, 10, 20, 30, 40 , 50, 100, 200 or 500 non-contiguous amino acid substitutions relative to SEQ ID NO:1. In other aspects of this embodiment, an active BoNT/A has, e.g., at least one, two, three, four, five, six, seven, eight, nine, 10, 20, 30, 40 , 50, 100, 200 or 500 non-contiguous amino acid substitutions relative to SEQ ID NO:1. In yet other aspects of this embodiment, an active BoNT/A has, e.g., at most one, two, three, four, five, six, seven, eight, nine, 10, 20, 30, 40 , 50, 100, 200 or 500 non-contiguous amino acid deletions relative to SEQ ID NO:1. In other aspects of this embodiment, an active BoNT/A has, e.g., at least one, two, three, four, five, six, seven, eight, nine, 10, 20, 30, 40 , 50, 100, 200 or 500 non-contiguous amino acid deletions relative to SEQ ID NO:1. In still other aspects of this embodiment, an active BoNT/A has, e.g., at most one, two, three, four, five, six, seven, eight, nine, 10, 20, 30, 40, 50, 100, 200 or 500 non-contiguous amino acid additions relative to SEQ ID NO:1. In other aspects of this embodiment, an active BoNT/A has, e.g., at least one, two, three, four, five, six, seven, eight, nine, 10, 20, 30, 40, 50, 100, 200 or 500 non-contiguous amino acid additions relative to SEQ ID NO:1.

[0071] In other aspects of this embodiment, an active BoNT/A has, e.g., at most one, two, three, four, five, six, seven, eight, nine, 10, 20, 30, 40, 50, 100, 200 or 500 contiguous amino acid substitutions relative to SEQ ID NO:1. In other aspects of this embodiment, an active BoNT/A has, e.g., at least one, two, three, four, five, six, seven, eight, nine, 10, 20, 30, 40, 50, 100, 200 or 500 contiguous amino acid substitutions relative to SEQ ID NO:1. In yet other aspects of this embodiment, an active BoNT/A has, e.g., at most one, two, three, four, five, six, seven, eight, nine, 10, 20, 30, 40, 50, 100, 200 or 500 contiguous amino acid deletions relative to SEQ ID NO:1. In other aspects of this embodiment, an active BoNT/A has, e.g., at least one, two, three, four, five, six, seven, eight, nine, 10, 20, 30, 40, 50, 100, 200 or 500 contiguous amino acid deletions relative to SEQ ID NO:1. In still other aspects of this embodiment, an active BoNT/A has, e.g., at most one, two, three, four, five, six, seven, eight, nine, 10, 20, 30, 40, 50, 100, 200 or 500 contiguous amino acid additions relative to SEQ ID NO:1. In other aspects of this embodiment, an active BoNT/A has, e.g., at least one, two, three, four, five, six, seven, eight, nine, 10, 20, 30, 40, 50,100, 200 or 500 contiguous amino acid additions relative to SEQ ID NO:1.

[0072] Aspects of the present invention provide, in part, a heterologous cell. As used herein, the term “heterologous cell” means any cell other than the native strain of Clostridium from which the Clostridial toxin was discovered that expresses, or can be engineered to express an active BoNT/A disclosed in the present specification. Thus, for example, a heterologous cell that expresses a nucleic acid molecule comprising a modified open reading frame encoding an active BoNT/A would be any prokaryotic or eukaryotic cell other than the C. botulinum strain that produces the A serotype. The term heterologous cell encompasses cells from a variety of organisms, including, without limitation, bacteria strains, yeast strains, plant cells and cell lines derived from plants, insect cells and cell lines derived from insects and mammalian cells and cell lines derived from mammals. It is understood that cells useful in aspects of the invention can include, without limitation, primary cells; cultured cells; established cells; normal cells; transformed cells; tumor cells; infected cells; proliferating and terminally differentiated cells; and stably or transiently transfected cells. It is further understood that cells useful in aspects of the invention can be in any state such as proliferating or quiescent; intact or permeabilized such as through chemical-mediated transfection such as, e.g., calcium phosphate-mediated, diethyl-aminoethyl (DEAE) dextran-mediated, lipid-mediated, polyethyleneimine (PEI)-mediated and polybrene-mediated; physical-mediated tranfection, such as, e.g., biolistic particle delivery, microinjection and electroporation; and viral-mediated transfection, such as, e.g., retroviral-mediated transfection. It is further understood that cells useful in aspects of the invention may include those which express an active BoNT/A under control of a constitutive, tissue-specific, cell-specific or inducible promoter element, enhancer element or both.

[0073] Because a wide variety of factors could influence the selection of a specific heterologous cell, nucleic acid molecules comprising a modified open reading frame providing increased expression of the encoded active BoNT/A can be designed to be expressed in a range of prokaryotic and eukaryotic cells. Codon usage tables and G+C content information for prokaryotic and eukaryotic organisms are publicly maintained by the Codon Usage Database, The First Laboratory for Plant Gene Research, Kazusa DNA Research Institute (2004), at URL address www.kazusa.or.jp/codon.

[0074] Thus in an embodiment, nucleic acid molecules comprising a modified open reading frame providing increased expression of the encoded active BoNT/A are expressed in a prokaryotic cell. Non-limiting examples of prokaryotic cells include strains of aerobic, microaerophilic, capnophilic, facultative, anaerobic, gram-negative and gram-positive bacterial cells such as those derived from, e.g., Escherichia coli, Bacillus subtilis, Bacillus licheniformis, Bacteroides fragilis, Clostridia perfringens, Clostridia difficile, Caulobacter crescentus, Lactococcus lactis, Methylobacterium extorquens, Neisseria meningirulls, Neisseria meningitidis, Pseudomonas fluorescens and Salmonella typhimurium. In an aspect of this embodiment, a nucleic acid molecule disclosed in the present specification is expressed in an E. coli strain. In other aspects of this embodiment, a nucleic acid molecule is expressed in an E. coli strain comprises, e.g., the open reading frame of SEQ ID NO: 3, SEQ ID NO: 4, SEQ ID NO: 5, SEQ ID NO: 6, SEQ ID NO: 110, SEQ ID NO: 112 and SEQ ID NO: 122 through SEQ ID NO: 125. In an aspect of this embodiment, a nucleic acid molecule disclosed in the present specification is expressed in a B. fragilis strain. In other aspects of this embodiment, a nucleic acid molecule expressed in a B. fragilis strain comprises, e.g., the open reading frame of SEQ ID NO: 7, SEQ ID NO: 8 or SEQ ID NO: 9. In an aspect of this embodiment, a nucleic acid molecule disclosed in the present specification is expressed in a B. licheniformis strain. In other aspects of this embodiment, a nucleic acid molecule expressed in a B. licheniformis strain comprises, e.g., the open reading frame of SEQ ID NO: 10, SEQ ID NO: 11 or SEQ ID NO: 12. In an aspect of this embodiment, a nucleic acid molecule disclosed in the present specification is expressed in a B. subtilis strain. In other aspects of this embodiment, a nucleic acid molecule expressed in an B. subtilis strain comprises, e.g., the open reading frame of SEQ ID NO: 13, SEQ ID NO: 14 or SEQ ID NO: 15. In an aspect of this embodiment, a nucleic acid molecule disclosed in the present specification is expressed in a C. crescentus strain. In other aspects of this embodiment, a nucleic acid molecule expressed in a C. crescentus strain comprises, e.g., the open reading frame of SEQ ID NO: 16, SEQ ID NO: 17 or SEQ ID NO: 18. In an aspect of this embodiment, a nucleic acid molecule disclosed in the present specification is expressed in a C. difficile strain. In another aspect of this embodiment, a nucleic acid molecule expressed in a C. difficile strain comprises, e.g., the open reading frame of SEQ ID NO: 19, SEQ ID NO: 20 or SEQ ID NO: 21. In an aspect of this embodiment, a nucleic acid molecule disclosed in the present specification is expressed in a C. perfringens strain. In other aspects of this embodiment, a nucleic acid molecule expressed in a C. perfringens strain comprises, e.g., the open reading frame of SEQ ID NO: 22, SEQ ID NO: 23 or SEQ ID NO: 24. In an aspect of this embodiment, a nucleic acid molecule disclosed in the present specification is expressed in a L. lactis strain. In another aspect of this embodiment, a nucleic acid molecule expressed in a L. lactis strain comprises, e.g., the open reading frame of SEQ ID NO: 25, SEQ ID NO: 26 or SEQ ID NO: 27. In an aspect of this embodiment, a nucleic acid molecule disclosed in the present specification is expressed in a M. extorquens strain. In another aspect of this embodiment, a nucleic acid molecule expressed in a M. extorquens strain comprises, e.g., the open reading frame of SEQ ID NO: 28, SEQ ID NO: 29 or SEQ ID NO: 30. In an aspect of this embodiment, a nucleic acid molecule disclosed in the present specification is expressed in an N. meningirulls strain. In an aspect of this embodiment, a nucleic acid molecule disclosed in the present specification is expressed in a P. fluorescens strain. In an aspect of this embodiment, a nucleic acid molecule disclosed in the present specification is expressed in a S. typhimurium strain. In other aspects of this embodiment, a nucleic acid molecule expressed in a S. typhimurium strain comprises, e.g., the open reading frame of SEQ ID NO: 31, SEQ ID NO: 32 or SEQ ID NO: 33.

[0075] In another embodiment, nucleic acid molecules comprising a modified open reading frame providing increased expression of the encoded active BoNT/A is expressed in an eukaryotic cell or cell line derived from an eukaryotic cell. In aspects of this embodiment, a nucleic acid molecule expressed in an eukaryotic cell or cell line derived from an eukaryotic cell comprises, e.g., any one of the open reading frames of SEQ ID NO: 34 through SEQ ID NO: 99.

[0076] In yet another embodiment, nucleic acid sequence molecules comprising a modified open reading frame providing increased expression of the encoded active BoNT/A is expressed in a yeast strain. Non-limiting examples of yeast strains include those derived from, e.g., Pichia pastoris, Pichia methanolica, Pichia angusta, Schizosaccharomyces pombe, Saccharomyces cerevisiae and Yarrowia lipolytica. In an aspect of this embodiment, a nucleic acid molecule disclosed in the present specification is expressed in a P. pastoris strain. In other aspects of this embodiment, a nucleic acid molecule expressed in a P. pastoris strain comprises, e.g., the open reading frame of SEQ ID NO: 34, SEQ ID NO: 35 or SEQ ID NO: 36. In an aspect of this embodiment, a nucleic acid molecule disclosed in the present specification is expressed in a P. methanolica strain. In other aspects of this embodiment, a nucleic acid molecule expressed in a P. methanolica strain comprises, e.g., the open reading frame of SEQ ID NO: 34, SEQ ID NO: 35 or SEQ ID NO: 36. In an aspect of this embodiment, a nucleic acid molecule disclosed in the present specification is expressed in a P. angusta strain. In other aspects of this embodiment, a nucleic acid molecule expressed in a P. angusta strain comprises, e.g., the open reading frame of SEQ ID NO: 34, SEQ ID NO: 35 or SEQ ID NO: 36. In an aspect of this embodiment, a nucleic acid molecule disclosed in the present specification is expressed in a S. cerevisiae strain. In other aspects of this embodiment, a nucleic acid molecule expressed in a S. cerevisiae strain comprises, e.g., the open reading frame of SEQ ID NO: 37, SEQ ID NO: 38 or SEQ ID NO: 39. In an aspect of this embodiment, a nucleic acid molecule disclosed in the present specification is expressed in a S. pombe strain. In other aspects of this embodiment, a nucleic acid molecule expressed in a S. pombe strain comprises, e.g., the open reading frame of SEQ ID NO: 40, SEQ ID NO: 41 or SEQ ID NO: 42. In an aspect of this embodiment, a nucleic acid molecule disclosed in the present specification is expressed in a Y. lipolytica strain. In other aspects of this embodiment, a nucleic acid molecule expressed in a Y. lipolytica strain comprises, e.g., the open reading frame of SEQ ID NO: 43, SEQ ID NO: 44 or SEQ ID NO: 45.

[0077] In yet another embodiment, nucleic acid sequence molecules comprising a modified open reading frame providing increased expression of the encoded active BoNT/A is expressed in a slime mold strain. Non-limiting examples of slime mold strains include those derived from, e.g., Dictyostelium discoideum. In an aspect of this embodiment, a nucleic acid molecule disclosed in the present specification is expressed in a D. discoideum strain. In other aspects of this embodiment, a nucleic acid molecule expressed in a D. discoideum strain comprises, e.g., the open reading frame of SEQ ID NO: 46, SEQ ID NO: 47 or SEQ ID NO: 48.

[0078] In yet another embodiment, nucleic acid sequence molecules comprising a modified open reading frame providing increased expression of the encoded active BoNT/A is expressed in a plant cell. Non-limiting examples of plant cells and cell lines derived from plant cells include those derived from, e.g., species of monocots, such as, e.g., Zea mays and species of dicots, such as, e.g., Arabidopsis thaliana, Triticum aestivum, Lemna gibba and Lemna minor. In an aspect of this embodiment, a nucleic acid molecule disclosed in the present specification is expressed in a monocot cell or cell line derived from a monocot cell. In an aspect of this embodiment, a nucleic acid molecule disclosed in the present specification is expressed in a dicot cell or cell line derived from a dicot cell. In an aspect of this embodiment, a nucleic acid molecule disclosed in the present specification is expressed in an A. thaliana cell or cell line derived from an A. thaliana cell. In other aspects of this embodiment, a nucleic acid molecule expressed in an A. thaliana cell or cell line derived from an A. thaliana cell comprises, e.g., the open reading frame of SEQ ID NO: 49, SEQ ID NO: 50 or SEQ ID NO: 51. In an aspect of this embodiment, a nucleic acid molecule disclosed in the present specification is expressed in a T. aestivium cell or cell line derived from an A. thaliana cell. In other aspects of this embodiment, a nucleic acid molecule expressed in an A. thaliana cell or cell line derived from a T. aestivum cell comprises, e.g., the open reading frame of SEQ ID NO: 52, SEQ ID NO: 53 or SEQ ID NO: 54. In an aspect of this embodiment, a nucleic acid molecule disclosed in the present specification is expressed in a Z. mays cell or cell line derived from a Z. mays cell. In other aspects of this embodiment, a nucleic acid molecule expressed in a Z. mays cell or cell line derived from a Z. mays cell comprises, e.g., the open reading frame of SEQ ID NO: 55, SEQ ID NO: 56 or SEQ ID NO: 57.

[0079] In yet another embodiment, nucleic acid sequence molecules comprising a modified open reading frame providing increased expression of the encoded active BoNT/A is expressed in an insect cell or a cell line derived from insects. Non-limiting examples of insect cells and cell lines derived from insects such as those derived from, e.g., Spodoptera frugiperda, Trichoplusia ni, Drosophila melanogaster and Manduca sexta. In an aspect of this embodiment, a nucleic acid molecule disclosed in the present specification is expressed in a D. melanogaster cell or a cell line derived from D. melanogaster. In other aspects of this embodiment, a nucleic acid molecule expressed in a D. melanogaster cell or a cell line derived from D. melanogaster comprises, e.g., the open reading frame of SEQ ID NO: 58, SEQ ID NO: 59 or SEQ ID NO: 60. In an aspect of this embodiment, a nucleic acid molecule disclosed in the present specification is expressed in a S. frugiperda strain or a cell line derived from S. frugiperda. In other aspects of this embodiment, a nucleic acid molecule expressed in a S. frugiperda cell or a cell line derived from S. frugiperda comprises, e.g., the open reading frame of SEQ ID NO: 61, SEQ ID NO: 62 or SEQ ID NO: 63. In an aspect of this embodiment, a nucleic acid molecule disclosed in the present specification is expressed in a T. ni cell or a cell line derived from T. ni. In other aspects of this embodiment, a nucleic acid molecule expressed in a T. ni cell or a cell line derived from T. ni comprises, e.g., the open reading frame of SEQ ID NO: 61, SEQ ID NO: 62 or SEQ ID NO: 63. In an aspect of this embodiment, a nucleic acid molecule disclosed in the present specification is expressed in a M. sexta strain or a cell line derived from M. sexta. In an aspect of this embodiment, a nucleic acid molecule disclosed in the present specification is expressed in a Sf9 cell line. In other aspects of this embodiment, a nucleic acid molecule expressed in a Sf9 cell line comprises, e.g., the open reading frame of SEQ ID NO: 61, SEQ ID NO: 62 or SEQ ID NO: 63. In an aspect of this embodiment, a nucleic acid molecule disclosed in the present specification is expressed in a Sf21 cell line. In other aspects of this embodiment, a nucleic acid molecule expressed in a Sf21 cell line comprises, e.g., the open reading frame of SEQ ID NO: 61, SEQ ID NO: 62 or SEQ ID NO: 63. In an aspect of this embodiment, a nucleic acid molecule disclosed in the present specification is expressed in a High-Five cell line. In other aspects of this embodiment, a nucleic acid molecule expressed in a High-Five cell line comprises, e.g., the open reading frame of SEQ ID NO: 61, SEQ ID NO: 62 or SEQ ID NO: 63. In an aspect of this embodiment, a nucleic acid molecule disclosed in the present specification is expressed in a Schneider's Drosophila line 2 (S2) cell line. In other aspects of this embodiment, a nucleic acid molecule expressed in a Schneider's Drosophila line 2 (S2) cell line comprises, e.g., the open reading frame of SEQ ID NO: 58, SEQ ID NO: 59 or SEQ ID NO: 60. In an aspect of this embodiment, a nucleic acid molecule disclosed in the present specification is expressed in a Kc cell line. In other aspects of this embodiment, a nucleic acid molecule expressed in a Kc cell line comprises, e.g., the open reading frame of SEQ ID NO: 58, SEQ ID NO: 59 or SEQ ID NO: 60.

[0080] In yet another embodiment, nucleic acid sequence molecules comprising a modified open reading frame providing increased expression of the encoded active BoNT/A is expressed in a fish cell or a cell line derived from a fish cell. Non-limiting examples of fish cells and cell lines derived from fish cells include those derived from, e.g., Danio rerio. In an aspect of this embodiment, a nucleic acid molecule disclosed in the present specification is expressed in a D. rerio cell or a cell line derived from D. rerio. In other aspects of this embodiment, a nucleic acid molecule expressed in a D. rerio cell or a cell line derived from D. rerio comprises, e.g., the open reading frame of SEQ ID NO: 64, SEQ ID NO: 65 or SEQ ID NO: 66.

[0081] In yet another embodiment, nucleic acid sequence molecules comprising a modified open reading frame providing increased expression of the encoded active BoNT/A is expressed in an amphibian cell. Non-limiting examples of amphibian cells and cell lines derived from amphibian cells include those derived from, e.g., Xenopus. In an aspect of this embodiment, a nucleic acid molecule disclosed in the present specification is expressed in a X. laevis cell or a cell line derived from X. laevis. In other aspects of this embodiment, a nucleic acid molecule expressed in a X. laevis cell or a cell line derived from X. laevis comprises, e.g., the open reading frame of SEQ ID NO: 67, SEQ ID NO: 68 or SEQ ID NO: 69. In another aspect of this embodiment, a nucleic acid molecule disclosed in the present specification is expressed in a X. tropicalis cell or a cell line derived from X. tropicalis. In other aspects of this embodiment, a nucleic acid molecule expressed in a X. tropicalis cell or a cell line derived from X. tropicalis comprises, e.g., the open reading frame of SEQ ID NO: 70, SEQ ID NO: 71 or SEQ ID NO: 72.

[0082] In yet another embodiment, nucleic acid sequence molecules comprising a modified open reading frame providing increased expression of the encoded active BoNT/A is expressed in a bird cell. Non-limiting examples of bird cells and cell lines derived from bird cells include those derived from, e.g., Gallus gallus. In an aspect of this embodiment, a nucleic acid molecule disclosed in the present specification is expressed in a G. gallus cell or a cell line derived from G. gallus. In other aspects of this embodiment, a nucleic acid molecule expressed in a G. gallus cell or a cell line derived from G. gallus comprises, e.g., the open reading frame of SEQ ID NO: 73, SEQ ID NO: 74 or SEQ ID NO: 75.

[0083] In yet another embodiment, nucleic acid sequence molecules comprising a modified open reading frame providing increased expression of the encoded active BoNT/A is expressed in a mammalian cell. Non-limiting examples of mammalian cells and cell lines derived from mammalian cells include those derived from, e.g., mouse, rat, hamster, porcine, bovine, equine, primate and human. In an aspect of this embodiment, a nucleic acid molecule disclosed in the present specification is expressed in a mouse cell or a cell line derived from mouse. In other aspects of this embodiment, a nucleic acid molecule expressed in a mouse cell or a cell line derived from mouse comprises, e.g., the open reading frame of SEQ ID NO: 76, SEQ ID NO: 77 or SEQ ID NO: 78. In yet another aspect of this embodiment, a nucleic acid molecule disclosed in the present specification is expressed in a Mus musculus cell or a cell line derived from M. musculus. In yet other aspects of this embodiment, a nucleic acid molecule expressed in a M. musculus cell or a cell line derived from M. musculus comprises, e.g., the open reading frame of SEQ ID NO: 76, SEQ ID NO: 77 or SEQ ID NO: 78. In an aspect of this embodiment, a nucleic acid molecule disclosed in the present specification is expressed in a 10T1/2 cell line. In other aspects of this embodiment, a nucleic acid molecule expressed in a 10T1/2 cell line comprises, e.g., the open reading frame of SEQ ID NO: 76, SEQ ID NO: 77 or SEQ ID NO: 78. In another aspect of this embodiment, a nucleic acid molecule disclosed in the present specification is expressed in a BALB/3T3 cell line. In yet other aspects of this embodiment, a nucleic acid molecule expressed in a BALB/3T3 cell line comprises, e.g., the open reading frame of SEQ ID NO: 76, SEQ ID NO: 77 or SEQ ID NO: 78. In another aspect of this embodiment, a nucleic acid molecule disclosed in the present specification is expressed in a L-M cell line. In yet other aspects of this embodiment, a nucleic acid molecule expressed in a L-M cell line comprises, e.g., the open reading frame of SEQ ID NO: 76, SEQ ID NO: 77 or SEQ ID NO: 78. In another aspect of this embodiment, a nucleic acid molecule disclosed in the present specification is expressed in a NB4 cell line. In yet other aspects of this embodiment, a nucleic acid molecule expressed in a NB4 cell line comprises, e.g., the open reading frame of SEQ ID NO: 76, SEQ ID NO: 77 or SEQ ID NO: 78. In another aspect of this embodiment, a nucleic acid molecule disclosed in the present specification is expressed in a 1A3 cell line. In yet other aspects of this embodiment, a nucleic acid molecule expressed in a 1A3 cell line comprises, e.g., the open reading frame of SEQ ID NO: 76, SEQ ID NO: 77 or SEQ ID NO: 78. In another aspect of this embodiment, a nucleic acid molecule disclosed in the present specification is expressed in a NIE-115 cell line. In yet other aspects of this embodiment, a nucleic acid molecule expressed in a NIE-115 cell line comprises, e.g., the open reading frame of SEQ ID NO: 76, SEQ ID NO: 77 or SEQ ID NO: 78. In another aspect of this embodiment, a nucleic acid molecule disclosed in the present specification is expressed in a NG108-15 cell line. In yet other aspects of this embodiment, a nucleic acid molecule expressed in a NG108-15 cell line comprises, e.g., the open reading frame of SEQ ID NO: 76, SEQ ID NO: 77 or SEQ ID NO: 78. In another aspect of this embodiment, a nucleic acid molecule disclosed in the present specification is expressed in a NIH3T3 cell line. In yet other aspects of this embodiment, a nucleic acid molecule expressed in a NIH3T3 cell line comprises, e.g., the open reading frame of SEQ ID NO: 76, SEQ ID NO: 77 or SEQ ID NO: 78. In another aspect of this embodiment, a nucleic acid molecule disclosed in the present specification is expressed in a NCTC cell line. In yet other aspects of this embodiment, a nucleic acid molecule expressed in a NCTC cell line comprises, e.g., the open reading frame of SEQ ID NO: 76, SEQ ID NO: 77 or SEQ ID NO: 78. In another aspect of this embodiment, a nucleic acid molecule disclosed in the present specification is expressed in a Neuro-2A cell line. In yet other aspects of this embodiment, a nucleic acid molecule expressed in a Neuro-2A cell line comprises, e.g., the open reading frame of SEQ ID NO: 76, SEQ ID NO: 77 or SEQ ID NO: 78.

[0084] In an aspect of this embodiment, a nucleic acid molecule disclosed in the present specification is expressed in a rat cell or a cell line derived from rat. In other aspects of this embodiment, a nucleic acid molecule expressed in a rat cell or a cell line derived from rat comprises, e.g., the open reading frame of SEQ ID NO: 79, SEQ ID NO: 80 or SEQ ID NO: 81. In yet another aspect of this embodiment, a nucleic acid molecule disclosed in the present specification is expressed in a Rattus norvegicus cell or a cell line derived from R. norvegicus. In yet another aspect of this embodiment, a nucleic acid molecule expressed in a R. norvegicus cell or a cell line derived from R. norvegicus comprises, e.g., the open reading frame of SEQ ID NO: 79, SEQ ID NO: 80 or SEQ ID NO: 81. In an aspect of this embodiment, a nucleic acid molecule disclosed in the present specification is expressed in a PC12 cell line. In other aspects of this embodiment, a nucleic acid molecule expressed in a PC12 cell line comprises, e.g., the open reading frame of SEQ ID NO: 79, SEQ ID NO: 80 or SEQ ID NO: 81. In another aspect of this embodiment, a nucleic acid molecule disclosed in the present specification is expressed in a GH1 cell line. In yet other aspects of this embodiment, a nucleic acid molecule expressed in a GH1 cell line comprises, e.g., the open reading frame of SEQ ID NO: 79, SEQ ID NO: 80 or SEQ ID NO: 81. In another aspect of this embodiment, a nucleic acid molecule disclosed in the present specification is expressed in a GH3 cell line. In yet other aspects of this embodiment, a nucleic acid molecule expressed in a GH3 cell line comprises, e.g., the open reading frame of SEQ ID NO: 79, SEQ ID NO: 80 or SEQ ID NO: 81. In another aspect of this embodiment, a nucleic acid molecule disclosed in the present specification is expressed in a C6 cell line. In yet other aspects of this embodiment, a nucleic acid molecule expressed in a C6 cell line comprises, e.g., the open reading frame of SEQ ID NO: 79, SEQ ID NO: 80 or SEQ ID NO: 81. In another aspect of this embodiment, a nucleic acid molecule disclosed in the present specification is expressed in a L2 cell line. In yet other aspects of this embodiment, a nucleic acid molecule expressed in a L2 cell line comprises, e.g., the open reading frame of SEQ ID NO: 79, SEQ ID NO: 80 or SEQ ID NO: 81.

[0085] In an aspect of this embodiment, a nucleic acid molecule disclosed in the present specification is expressed in a hamster cell or a cell line derived from hamster. In other aspects of this embodiment, a nucleic acid molecule expressed in a hamster cell or a cell line derived from hamster comprises, e.g., the open reading frame of SEQ ID NO: 82, SEQ ID NO: 83 or SEQ ID NO: 84. In yet another aspect of this embodiment, a nucleic acid molecule disclosed in the present specification is expressed in a Cricetulus griseus cell or a cell line derived from C. griseus. In yet other aspects of this embodiment, a nucleic acid molecule expressed in a C. griseus cell or a cell line derived from C. griseus comprises, e.g., the open reading frame of SEQ ID NO: 82, SEQ ID NO: 83 or SEQ ID NO: 84. In an aspect of this embodiment, a nucleic acid molecule disclosed in the present specification is expressed in a CHO cell line. In other aspects of this embodiment, a nucleic acid molecule expressed in a CHO cell line comprises, e.g., the open reading frame of SEQ ID NO: 82, SEQ ID NO: 83 or SEQ ID NO: 84. In another aspect of this embodiment, a nucleic acid molecule disclosed in the present specification is expressed in a 6E6 cell line. In yet other aspects of this embodiment, a nucleic acid molecule expressed in a 6E6 cell line comprises, e.g., the open reading frame of SEQ ID NO: 82, SEQ ID NO: 83 or SEQ ID NO: 84.

[0086] In an aspect of this embodiment, a nucleic acid molecule disclosed in the present specification is expressed in a porcine cell or a cell line derived from porcine. In other aspects of this embodiment, a nucleic acid molecule expressed in a porcine cell or a cell line derived from porcine comprises, e.g., the open reading frame of SEQ ID NO: 85, SEQ ID NO: 86 or SEQ ID NO: 87. In yet another aspect of this embodiment, a nucleic acid molecule disclosed in the present specification is expressed in a Sus scrofa cell or a cell line derived from S. scrofa. In yet other aspects of this embodiment, a nucleic acid molecule expressed in a S. scrofa cell or a cell line derived from S. scrofa comprises, e.g., the open reading frame of SEQ ID NO: 85, SEQ ID NO: 86 or SEQ ID NO: 87. In an aspect of this embodiment, a nucleic acid molecule disclosed in the present specification is expressed in a PK15 cell line. In other aspects of this embodiment, a nucleic acid molecule expressed in a PK15 cell line comprises, e.g., the open reading frame of SEQ ID NO: 85, SEQ ID NO: 86 or SEQ ID NO: 87. In another aspect of this embodiment, a nucleic acid molecule disclosed in the present specification is expressed in a LLC-PK1 cell line. In yet other aspects of this embodiment, a nucleic acid molecule expressed in a LLC-PK1 cell line comprises, e.g., the open reading frame of SEQ ID NO: 85, SEQ ID NO: 86 or SEQ ID NO: 87. In another aspect of this embodiment, a nucleic acid molecule disclosed in the present specification is expressed in a ST cell line. In yet other aspects of this embodiment, a nucleic acid molecule expressed in a ST cell line comprises, e.g., the open reading frame of SEQ ID NO: 85, SEQ ID NO: 86 or SEQ ID NO: 87. In another aspect of this embodiment, a nucleic acid molecule disclosed in the present specification is expressed in a ESK-4 cell line. In yet other aspects of this embodiment, a nucleic acid molecule expressed in a ESK-4 cell line comprises, e.g., the open reading frame of SEQ ID NO: 85, SEQ ID NO: 86 or SEQ ID NO: 87.

[0087] In an aspect of this embodiment, a nucleic acid molecule disclosed in the present specification is expressed in a bovine cell or a cell line derived from bovine. In other aspects of this embodiment, a nucleic acid molecule expressed in a bovine cell or a cell line derived from bovine comprises, e.g., the open reading frame of SEQ ID NO: 88, SEQ ID NO: 89 or SEQ ID NO: 90. In yet another aspect of this embodiment, a nucleic acid molecule disclosed in the present specification is expressed in a Bos taurus cell or a cell line derived from B. taurus. In yet other aspects of this embodiment, a nucleic acid molecule expressed in a B. taurus cell or a cell line derived from B. taurus comprises, e.g., the open reading frame of SEQ ID NO: 88, SEQ ID NO: 89 or SEQ ID NO: 90. In an aspect of this embodiment, a nucleic acid molecule disclosed in the present specification is expressed in a CPAE cell line. In other aspects of this embodiment, a nucleic acid molecule expressed in a CPAE cell line comprises, e.g., the open reading frame of SEQ ID NO: 88, SEQ ID NO: 89 or SEQ ID NO: 90. In another aspect of this embodiment, a nucleic acid molecule disclosed in the present specification is expressed in a BT cell line. In yet other aspects of this embodiment, a nucleic acid molecule expressed in a BT cell line comprises, e.g., the open reading frame of SEQ ID NO: 88, SEQ ID NO: 89 or SEQ ID NO: 90. In another aspect of this embodiment, a nucleic acid molecule disclosed in the present specification is expressed in a SBAC cell line. In yet other aspects of this embodiment, a nucleic acid molecule expressed in a SBAC cell line comprises, e.g., the open reading frame of SEQ ID NO: 88, SEQ ID NO: 89 or SEQ ID NO: 90. In another aspect of this embodiment, a nucleic acid molecule disclosed in the present specification is expressed in a FB2 cell line. In yet other aspects of this embodiment, a nucleic acid molecule expressed in a FB2 cell line comprises, e.g., the open reading frame of SEQ ID NO: 88, SEQ ID NO: 89 or SEQ ID NO: 90.

[0088] In an aspect of this embodiment, a nucleic acid molecule disclosed in the present specification is expressed in a equine cell or a cell line derived from equine. In other aspects of this embodiment, a nucleic acid molecule expressed in a equine cell or a cell line derived from equine comprises, e.g., the open reading frame of SEQ ID NO: 91, SEQ ID NO: 92 or SEQ ID NO: 93. In yet another aspect of this embodiment, a nucleic acid molecule disclosed in the present specification is expressed in a Equus caballus cell or a cell line derived from E. caballus. In yet other aspects of this embodiment, a nucleic acid molecule expressed in a E. caballus cell or a cell line derived from E. caballus comprises, e.g., the open reading frame of SEQ ID NO: 91, SEQ ID NO: 92 or SEQ ID NO: 93. In an aspect of this embodiment, a nucleic acid molecule disclosed in the present specification is expressed in a NBL-6 cell line. In other aspects of this embodiment, a nucleic acid molecule expressed in a NBL-6 cell line comprises, e.g., the open reading frame of SEQ ID NO: 91, SEQ ID NO: 92 or SEQ ID NO: 93.

[0089] In an aspect of this embodiment, a nucleic acid molecule disclosed in the present specification is expressed in a primate cell or a cell line derived from primate. In other aspects of this embodiment, a nucleic acid molecule expressed in a primate cell or a cell line derived from primate comprises, e.g., the open reading frame of SEQ ID NO: 94, SEQ ID NO: 95 or SEQ ID NO: 96. In yet another aspect of this embodiment, a nucleic acid molecule disclosed in the present specification is expressed in a Cercopithecus aethiops cell or a cell line derived from C. aethiops. In yet other aspects of this embodiment, a nucleic acid molecule expressed in a C. aethiops cell or a cell line derived from C. aethiops comprises, e.g., the open reading frame of SEQ ID NO: 94, SEQ ID NO: 95 or SEQ ID NO: 96. In an aspect of this embodiment, a nucleic acid molecule disclosed in the present specification is expressed in a COS-1 cell line. In other aspects of this embodiment, a nucleic acid molecule expressed in a COS-1 cell line comprises, e.g., the open reading frame of SEQ ID NO: 94, SEQ ID NO: 95 or SEQ ID NO: 96. In another aspect of this embodiment, a nucleic acid molecule disclosed in the present specification is expressed in a COS-7 cell line. In yet other aspects of this embodiment, a nucleic acid molecule expressed in a COS-7 cell line comprises, e.g., the open reading frame of SEQ ID NO: 94, SEQ ID NO: 95 or SEQ ID NO: 96. In another aspect of this embodiment, a nucleic acid molecule disclosed in the present specification is expressed in a VV-1 cell line. In yet other aspects of this embodiment, a nucleic acid molecule expressed in a VV-1 cell line comprises, e.g., the open reading frame of SEQ ID NO: 94, SEQ ID NO: 95 or SEQ ID NO: 96.

[0090] In an aspect of this embodiment, a nucleic acid molecule disclosed in the present specification is expressed in a human cell or a cell line derived from human. In another aspect of this embodiment, a nucleic acid molecule expressed in a human cell or a cell line derived from human comprises, e.g., the open reading frame of SEQ ID NO: 97, SEQ ID NO: 98 or SEQ ID NO: 99. In yet another aspect of this embodiment, a nucleic acid molecule disclosed in the present specification is expressed in a Homo sapiens cell or a cell line derived from H. sapiens. In another aspect of this embodiment, a nucleic acid molecule expressed in a H. sapiens cell or a cell line derived from H. sapiens comprises, e.g., the open reading frame of SEQ ID NO: 97, SEQ ID NO: 98 or SEQ ID NO: 99. In an aspect of this embodiment, a nucleic acid molecule disclosed in the present specification is expressed in a SH-SY5Y cell line. In other aspects of this embodiment, a nucleic acid molecule expressed in a SH-SY5Y cell line comprises, e.g., the open reading frame of SEQ ID NO: 97, SEQ ID NO: 98 or SEQ ID NO: 99. In another aspect of this embodiment, a nucleic acid molecule disclosed in the present specification is expressed in a SK-N-DZ cell line. In yet other aspects of this embodiment, a nucleic acid molecule expressed in a SK-N-DZ cell line comprises, e.g., the open reading frame of SEQ ID NO: 97, SEQ ID NO: 98 or SEQ ID NO: 99. In another aspect of this embodiment, a nucleic acid molecule disclosed in the present specification is expressed in a SK-N-SH cell line. In yet other aspects of this embodiment, a nucleic acid molecule expressed in a SK-N-SH cell line comprises, e.g., the open reading frame of SEQ ID NO: 97, SEQ ID NO: 98 or SEQ ID NO: 99. In another aspect of this embodiment, a nucleic acid molecule disclosed in the present specification is expressed in a BE(2)-C cell line. In yet other aspects of this embodiment, a nucleic acid molecule expressed in a BE(2)-C cell line comprises, e.g., the open reading frame of SEQ ID NO: 97, SEQ ID NO: 98 or SEQ ID NO: 99. In another aspect of this embodiment, a nucleic acid molecule disclosed in the present specification is expressed in a HeLa cell line. In yet other aspects of this embodiment, a nucleic acid molecule expressed in a HeLa cell line comprises, e.g., the open reading frame of SEQ ID NO: 97, SEQ ID NO: 98 or SEQ ID NO: 99. In another aspect of this embodiment, a nucleic acid molecule disclosed in the present specification is expressed in a HEK 293 cell line. In yet other aspects of this embodiment, a nucleic acid molecule expressed in a HEK 293 cell line comprises, e.g., the open reading frame of SEQ ID NO: 97, SEQ ID NO: 98 or SEQ ID NO: 99. In another aspect of this embodiment, a nucleic acid molecule disclosed in the present specification is expressed in a MCF-7 cell line. In yet other aspects of this embodiment, a nucleic acid molecule expressed in a MCF-7 cell line comprises, e.g., the open reading frame of SEQ ID NO: 97, SEQ ID NO: 98 or SEQ ID NO: 99. In another aspect of this embodiment, a nucleic acid molecule disclosed in the present specification is expressed in a HepG2 cell line. In yet other aspects of this embodiment, a nucleic acid molecule expressed in a HepG2 cell line comprises, e.g., the open reading frame of SEQ ID NO: 97, SEQ ID NO: 98 or SEQ ID NO: 99. In another aspect of this embodiment, a nucleic acid molecule disclosed in the present specification is expressed in a HL-60 cell line. In yet other aspects of this embodiment, a nucleic acid molecule expressed in a HL-60 cell line comprises, e.g., the open reading frame of SEQ ID NO: 97, SEQ ID NO: 98 or SEQ ID NO: 99. In another aspect of this embodiment, a nucleic acid molecule disclosed in the present specification is expressed in a IMR-32 cell line. In yet other aspects of this embodiment, a nucleic acid molecule expressed in a IMR-32 cell line comprises, e.g., the open reading frame of SEQ ID NO: 97, SEQ ID NO: 98 or SEQ ID NO: 99. In another aspect of this embodiment, a nucleic acid molecule disclosed in the present specification is expressed in a SW-13 cell line. In yet other aspects of this embodiment, a nucleic acid molecule expressed in a SW-13 cell line comprises, e.g., the open reading frame of SEQ ID NO: 97, SEQ ID NO: 98 or SEQ ID NO: 99. In another aspect of this embodiment, a nucleic acid molecule disclosed in the present specification is expressed in a CHP3 cell line. In yet other aspects of this embodiment, a nucleic acid molecule expressed in a CHP3 cell line comprises, e.g., the open reading frame of SEQ ID NO: 97, SEQ ID NO: 98 or SEQ ID NO: 99.

[0091] The nucleic acid molecules disclosed in the present specification include, in part, a modified open reading frame providing increased expression of an encoded active BoNT/A. Increased expression of an active BoNT/A is determined by comparing the amount of an active BoNT/A expressed from a modified open reading frame with the amount of the same active BoNT/A expressed from an unmodified open reading frame in an otherwise identical nucleic acid molecule. As used herein, the term “modified open reading frame” means an open reading frame that contains at least one nucleotide change providing increased quantitative and qualitative expression of the encoded active BoNT/A. As used herein, the term “unmodified open reading frame” means an open reading frame that does not contain any nucleotide changes providing increased expression of the encoded active BoNT/A. As a non-limiting example, SEQ ID NO: 2, SEQ ID NO: 114 and SEQ ID NO: 115 are unmodified open reading frames that will not provide increased expression of the encoded active BoNT/A in a heterologous cell and SEQ ID NO: 3 through SEQ ID NO: 99, SEQ ID NO: 110, SEQ ID NO: 112 and SEQ ID NO: 122 through SEQ ID NO: 125 are modified open reading frames that can provide increased expression of the encoded active BoNT/A in the appropriate heterologous cell. It is further understood by one skilled in the art that the methods and procedures used to express the nucleic acid molecules comprising the modified open reading frame should be the same or similar to the methods and procedures used to express the nucleic acid molecules comprising the unmodified open reading frame to ensure accurate and consistent comparisons.

[0092] A wide variety of well-established methods can be used to compare the amount of expressed active BoNT/A from a modified open reading frame to the amount of the same active BoNT/A expressed from an unmodified open reading frame in an otherwise identical nucleic acid molecule. Comparisons of amounts of an active BoNT/A expressed can be either qualitative or quantitative.

[0093] Active BoNT/A amounts can be measured using any procedure that can separate and visualize proteins from a cell lysate, such as, e.g., procedures involving gel electrophoresis and protein staining, Western blotting, protein-labeling, as well as, other procedures involving protein separation and visualization. Thus, amounts of active BoNT/A can be appraised by labeling active BoNT/A using a radioactive amino acid tracer and visualizing expression by autoradiography after gel electrophoresis. Likewise, incorporation of radiolabeled amino acids into active BoNT/A can be measured by scintillation counting after Trichloroacetic Acid (TCA) precipitation. Amounts of active BoNT/A can also be assessed by staining proteins separated by gel electrophoresis using, e.g., dye staining procedures like Coomassie Brilliant Blue and Colloidal Coomassie Brilliant Blue; fluorescence staining procedures like SYPRO® Ruby and ruthenium II; or silver staining procedures. Amounts of active BoNT/A can likewise be determined by antibody staining after Western blot analysis. Furthermore, functional assays that measure the biological activity of active BoNT/A can be used to compare amounts of active BoNT/A expressed from a modified open reading frame to the amount of the same active BoNT/A expressed from an unmodified open reading frame in an otherwise identical nucleic acid molecule, such as, e.g., SNAP25 cleavage assay and the GFP-SNAP25 Fluorescence Release Assay. Non-limiting examples of specific procedures to separate and visualize protein amounts, as well as well-characterized reagents, conditions and protocols are readily available from commercial vendors that include, without limitation, Amersham Biosciences, Piscataway, N.J.; Bio-Rad Laboratories, Hercules, Calif.; Pierce Biotechnology, Inc., Rockford, Ill.; Promega Corporation, Madison, Wis., and Stratagene, La Jolla, Calif. In addition, non-limiting examples of specific protocols necessary to separate, visualize and quantify a protein are described in e.g., MOLECULAR CLONING A LABORATORY MANUAL, supra, (2001); and CURRENT PROTOCOLS IN MOLECULAR BIOLOGY, supra, (2004). These protocols are routine procedures within the scope of one skilled in the art and from the teaching herein.

[0094] Active BoNT/A amounts can be measured after one or more purification steps using, without limitation, gel electrophoresis and protein staining, Western blotting, protein-labeling, UV absorbance, the Lowry assay, the biuret assay, the Smith copper/bicinchoninic (BCA) assay, and the Bradford dye assay, see e.g., Christine V. Sapan et al., Colorimetric Protein Assay Techniques, 29(2) BIOTECHNOL. APPL. BIOCHEM. 99-108, (1999). Any of a variety of methods can be used for purifying an active BoNT/A disclosed in the present specification. Examples of purification methods include, without limitation, ammonium sulfate or ethanol precipitation, acid extraction, ion exchange chromatography, phosphocellulose chromatography, lectin chromatography, affinity chromatography, hydrophobic interaction chromatography, size exclusion chromatography, gel-filtration chromatography, adsorption chromatography, hydroxyapatite chromatography, fast performance liquid chromatography (FPLC), and high performance liquid (HPLC) chromatography. Binding moieties of the target peptide of interest may be attached to any of a variety of substances including, without limitation resins, agarose, and magnetic beads. In addition, any of a variety of processing techniques can be used including, without limitation, batch-wise processing, and gravity-feed columns. Protein refolding steps may also be necessary to ensure recovery of a functionally active BoNT/A encoded by nucleic acid molecules disclosed in the specification. Non-limiting examples of specific protocols for purifying and recovering proteins are described in, e.g., John Abelson et al., GUIDE TO PROTEIN PURIFICATION, (Academic Press, 1990), PROTEIN PURIFICATION: PRINCIPLES AND PRACTICE, (Robert K. Scopes et al. eds., Springer Verlag, 3^{rd} ed. 1994), PROTEIN PURIFICATION TECHNIQUES: A PRACTICAL APPROACH, (Simon Roe ed., Oxford University Press, 2^{nd} ed. 2001), MOLECULAR CLONING A LABORATORY MANUAL, supra, (2001), Ian M. Rosenberg, PROTEIN ANALYSIS & PURIFICATION: BENCHTOP TECHNIQUES, (Springer Verlag, 2002). These protocols are routine procedures within the scope of one skilled in the art and from the teaching herein.

[0095] Thus, in an embodiment, the amount of an active BoNT/A expressed from a modified open reading frame is increased as compared to the amount of the same active BoNT/A expressed from an unmodified open reading frame. In is envisioned that, with the exception of the modified and unmodified open reading frames, the nucleic acid molecules comprising the open reading frames are similar or identical in nature. In aspects of this embodiment, the amount of an active BoNT/A expressed from a modified open reading frame is, e.g., increased at least 1.5-fold as compared to the amount of the same BoNT/A expressed from an unmodified open reading frame in an otherwise identical nucleic acid molecule; increased at least 2-fold as compared to the amount of the same BoNT/A expressed from an unmodified open reading frame in an otherwise identical nucleic acid molecule; increased at least 3-fold as compared to the amount of the same BoNT/A expressed from an unmodified open reading frame in an otherwise identical nucleic acid molecule; increased at least 4-fold as compared to the amount of the same BoNT/A expressed from an unmodified open reading frame in an otherwise identical nucleic acid molecule; increased at least 5-fold as compared to the amount of the same BoNT/A expressed from an unmodified open reading frame in an otherwise identical nucleic acid molecule; increased at least 10-fold as compared to the amount of the same BoNT/A expressed from an unmodified open reading frame in an otherwise identical nucleic acid molecule; increased at least 25-fold as compared to the amount of the same BoNT/A expressed from an unmodified open reading frame in an otherwise identical nucleic acid molecule; increased at least 50-fold as compared to the amount of the same BoNT/A expressed from an unmodified open reading frame in an otherwise identical nucleic acid molecule; increased at least 100-fold as compared to the amount of the same BoNT/A expressed from an unmodified open reading frame in an otherwise identical nucleic acid molecule; or increased at least 200-fold as compared to the amount of the same BoNT/A expressed from an unmodified open reading frame in an otherwise identical nucleic acid molecule.

[0096] In aspects of this embodiment, the amount of an active BoNT/A expressed from a modified open reading frame is, e.g., increased at most 1.5-fold as compared to the amount of the same BoNT/A expressed from an unmodified open reading frame in an otherwise identical nucleic acid molecule; increased at most 2-fold as compared to the amount of the same BoNT/A expressed from an unmodified open reading frame in an otherwise identical nucleic acid molecule; increased at most 3-fold as compared to the amount of the same BoNT/A expressed from an unmodified open reading frame in an otherwise identical nucleic acid molecule; increased at most 4-fold as compared to the amount of the same BoNT/A expressed from an unmodified open reading frame in an otherwise identical nucleic acid molecule; increased at most 5-fold as compared to the amount of the same BoNT/A expressed from an unmodified open reading frame in an otherwise identical nucleic acid molecule; increased at most 10-fold as compared to the amount of the same BoNT/A expressed from an unmodified open reading frame in an otherwise identical nucleic acid molecule; increased at most 25-fold as compared to the amount of the same BoNT/A expressed from an unmodified open reading frame in an otherwise identical nucleic acid molecule; increased at most 50-fold as compared to the amount of the same BoNT/A expressed from an unmodified open reading frame in an otherwise identical nucleic acid molecule; increased at most 100-fold as compared to the amount of the same BoNT/A expressed from an unmodified open reading frame in an otherwise identical nucleic acid molecule; or increased at most 200-fold as compared to the amount of the same BoNT/A expressed from an unmodified open reading frame in an otherwise identical nucleic acid molecule.

[0097] Other aspects of the present invention provide expression constructs comprising a nucleic acid molecule disclosed in the present specification, operably-linked to an expression vector useful for expressing the nucleic acid molecule in a heterologous cell. A wide variety of expression vectors are envisioned, including, without limitation, a prokaryotic expression vector useful for expressing a nucleic acid molecule comprising a modified open reading frame providing increased expression of the encoded active BoNT/A in a prokaryotic cell; a yeast expression vector useful for expressing a nucleic acid molecule comprising a modified open reading frame providing increased expression of the encoded active BoNT/A in a yeast cell; an insect expression vector useful for expressing a nucleic acid molecule comprising a modified open reading frame providing increased expression of the encoded active BoNT/A in an insect cell; a mammalian expression vector useful for expressing a nucleic acid molecule comprising a modified open reading frame providing increased expression of the encoded active BoNT/A in a mammalian cell and a expression vector useful for expressing a nucleic acid molecule in a cell-free extract comprising a modified open reading frame providing increased expression of the encoded active BoNT/A in the cell-free extract.

[0098] The expression constructs disclosed in the present specification include, in part, a nucleic acid molecule. It is envisioned that any and all nucleic acid molecules disclosed in the present specification can be used. Thus, aspects of this embodiment include, without limitation, nucleic acid molecules comprising a modified open reading frame providing increased expression of the encoded active BoNT/A in a prokaryotic cell; nucleic acid molecules comprising a modified open reading frame providing increased expression of the encoded active BoNT/A in a yeast cell; nucleic acid molecules comprising a modified open reading frame providing increased expression of the encoded active BoNT/A in an slime mold cell; nucleic acid molecules comprising a modified open reading frame providing increased expression of the encoded active BoNT/A in a plant cell or cell line derived from a plant cell; nucleic acid molecules comprising a modified open reading frame providing increased expression of the encoded active BoNT/A in an insect cell or cell line derived from an insect cell; nucleic acid molecules comprising a modified open reading frame providing increased expression of the encoded active BoNT/A in an fish cell or cell line derived from a fish cell; nucleic acid molecules comprising a modified open reading frame providing increased expression of the encoded active BoNT/A in an amphibian cell or cell line derived from an amphibian cell; nucleic acid molecules comprising a modified open reading frame providing increased expression of the encoded active BoNT/A in a bird cell or cell line derived from a bird cell; and nucleic acid molecules comprising a modified open reading frame providing increased expression of the encoded active BoNT/A in a mammalian cell or cell line derived from a mammalian cell, such as, e.g., mouse, rat, hamster, porcine, bovine, equine, primate and human.

[0099] The expression constructs disclosed in the present specification include, in part, a heterologous cell. It is envisioned that any and all heterologous cells disclosed in the present specification can be used. Thus, aspects of this embodiment include, without limitation, prokaryotic cells including, without limitation, strains of aerobic, microaerophilic, capnophilic, facultative, anaerobic, gram-negative and gram-positive bacterial cells such as those derived from, e.g., Escherichia coli, Bacillus subtilis, Bacillus licheniformis, Bacteroides fragilis, Clostridia perfringens, Clostridia difficile, Caulobacter crescentus, Lactococcus lactis, Methylobacterium extorquens, Neisseria meningirulls, Neisseria meningitidis, Pseudomonas fluorescens and Salmonella typhimurium; and eukaryotic cells including, without limitation, yeast strains, such as, e.g., those derived from Pichia pastoris, Pichia methanolica, Pichia angusta, Schizosaccharomyces pombe, Saccharomyces cerevisiae and Yarrowia lipolytica; slime mold strains, such as, e.g., those derived from, e.g., Dictyostelium discoideum; plant cells and cell lines derived from plant cells, such as, e.g., those derived from species of monocots, species of dicots, Zea mays and Arabidopsis thaliana; insect cells and cell lines derived from insects, such as, e.g., those derived from Spodoptera frugiperda, Trichoplusia ni, Drosophila melanogaster and Manduca sexta; fish cells and cell lines derived from fish cells, such as, e.g., those derived from Denio renia; amphibian cells and cell lines derived from amphibian cells, such as, e.g., those derived from Xenopus laevis and Xenopus tropicalis; bird cells and cell lines derived from bird cells, such as, e.g., those derived from Gallus gallus; mammalian cells and cell lines derived from mammalian cells, such as, e.g., those derived from mouse, rat, hamster, porcine, bovine, equine, primate and human.

[0100] The expression constructs disclosed in the present specification include, in part, a nucleic acid molecule disclosed in the present specification, operably-linked to an expression vector. As used herein, the term “operably linked” means any of a variety of cloning methods that can join a nucleic acid molecule disclosed in the present specification to an expression vector such that a peptide encoded by the nucleic acid molecule is expressed when introduced into a heterologous cell. Well-established molecular biology techniques that may be necessary to make an expression construct disclosed in the present specification including, but not limited to, procedures involving polymerase chain reaction (PCR) amplification restriction enzyme reactions, agarose gel electrophoresis, nucleic acid ligation, bacterial transformation, nucleic acid purification, nucleic acid sequencing and recombination-based techniques are routine procedures well within the scope of one skilled in the art and from the teaching herein. Non-limiting examples of specific protocols necessary to make an expression construct are described in e.g., MOLECULAR CLONING A LABORATORY MANUAL, supra, (2001); and CURRENT PROTOCOLS IN MOLECULAR BIOLOGY (Frederick M. Ausubel et al., eds. John Wiley & Sons, 2004), which are hereby incorporated by reference. These protocols are routine procedures well within the scope of one skilled in the art and from the teaching herein.

[0101] A wide variety of expression vectors can be employed for expressing an open reading frame encoding an active BoNT/A and include without limitation, viral expression vectors, prokaryotic expression vectors and eukaryotic expression vectors including yeast, insect, plant and mammalian expression vectors. Non-limiting examples of expression vectors, along with well-established reagents and conditions for making and using an expression construct from such expression vectors are readily available from commercial vendors that include, without limitation, BD Biosciences-Clontech, Palo Alto, Calif.; BD Biosciences Pharmingen, San Diego, Calif.; Invitrogen, Inc, Carlsbad, Calif.; EMD Biosciences-Novagen, Madison, Wis.; QIAGEN, Inc., Valencia, Calif.; and Stratagene, La Jolla, Calif. The selection, making and use of an appropriate expression vector are routine procedures well within the scope of one skilled in the art and from the teachings herein.

[0102] It is envisioned that any of a variety of expression systems may be useful for expressing constructs disclosed in the present specification. An expression system encompasses both cell-based systems and cell-free expression systems. Cell-based systems include, without limitation, viral expression systems, prokaryotic expression systems, yeast expression systems, baculoviral expression systems, insect expression systems and mammalian expression systems. Cell-free systems include, without limitation, wheat germ extracts, rabbit reticulocyte extracts and E. coli extracts and generally are equivalent to the method disclosed herein. Expression using an expression system can include any of a variety of characteristics including, without limitation, inducible expression, non-inducible expression, constitutive expression, viral-mediated expression, stably-integrated expression, and transient expression. Expression systems that include well-characterized vectors, reagents, conditions and cells are well-established and are readily available from commercial vendors that include, without limitation, Ambion, Inc. Austin, Tex.; BD Biosciences-Clontech, Palo Alto, Calif.; BD Biosciences Pharmingen, San Diego, Calif.; Invitrogen, Inc, Carlsbad, Calif.; QIAGEN, Inc., Valencia, Calif.; Roche Applied Science, Indianapolis, Ind.; and Stratagene, La Jolla, Calif. Non-limiting examples on the selection and use of appropriate heterologous expression systems are described in e.g., PROTEIN EXPRESSION. A PRACTICAL APPROACH (S. J. Higgins and B. David Hames eds., Oxford University Press, 1999); Joseph M. Fernandez & James P. Hoeffler, GENE EXPRESSION SYSTEMS. USING NATURE FOR THE ART OF EXPRESSION (Academic Press, 1999); and Meena Rai & Harish Padh, Expression Systems for Production of Heterologous Proteins, 80(9) CURRENT SCIENCE 1121-1128, (2001), which are hereby incorporated by reference. These protocols are routine procedures well within the scope of one skilled in the art and from the teaching herein.

[0103] Thus, in an embodiment disclosed in the present invention, a nucleic acid molecule disclosed in the present specification is operably linked to control sequences from a viral expression vector useful for expressing an encoded active BoNT/A in a viral expression system. Non-limiting examples of viral expression vector include lentivirus vectors, fowl pox virus, pseudorabies virus, retrovirus vectors, semliki forest virus vectors, sindbis virus vectors, vaccinia virus vectors, and adenovirus vectors. In an aspect of this embodiment, an expression construct comprises a viral expression vector operably linked to a modified open reading frame providing increased expression of an encoded active BoNT/A in a mammalian cell.

[0104] In another embodiment disclosed in the present invention, a nucleic acid molecule disclosed in the present specification is operably linked to control sequences from a prokaryotic expression vector useful for expressing an encoded active BoNT/A in a prokaryotic cell. Non-limiting examples of prokaryotic expression vectors include an Escherichia coli expression vector, a Bacillus subtilis expression vector, a Bacillus licheniformis expression vector, a Bacteroides fragilis expression vector, a Clostridia perfringens expression vector, a Clostridia difficile expression vector, a Caulobacter crescentus expression vector, a Lactococcus lactis expression vector, a Methylobacterium extorquens expression vector, a Neisseria meningirulls expression vector, a Neisseria meningitidis expression vector, a Pseudomonas fluorescens expression vector and a Salmonella typhimurium expression vector. In an aspect of this embodiment, an expression construct comprises a prokaryotic expression vector operably linked to a modified open reading frame providing increased expression of an encoded active BoNT/A in a prokaryotic cell. In an aspect of this embodiment, an expression construct comprises a pET28 expression vector and a modified open reading frame providing increased expression of an encoded active BoNT/A in an E. coli cell. In another aspect of this embodiment, an expression construct comprises a pET28 expression vector operably linked to a modified open reading frame of SEQ ID NO: 3 providing increased expression of the encoded active BoNT/A in an E. coli cell. In another aspect of this embodiment, an expression construct comprises a pET28 expression vector operably linked to a modified open reading frame of SEQ ID NO: 4 providing increased expression of the encoded active BoNT/A in an E. coli cell. In another aspect of this embodiment, an expression construct comprises a pET28 expression vector operably linked to a modified open reading frame of SEQ ID NO: 5 providing increased expression of the encoded active BoNT/A in an E. coli cell. In another aspect of this embodiment, an expression construct comprises a pET28 expression vector operably linked to a modified open reading frame of SEQ ID NO: 6 providing increased expression of the encoded active BoNT/A in an E. coli cell. In another aspect of this embodiment, an expression construct comprises a pET29 expression vector operably linked to a modified open reading frame of SEQ ID NO: 3 providing increased expression of the encoded active BoNT/A in an E. coli cell. In another aspect of this embodiment, an expression construct comprises a pET29 expression vector operably linked to a modified open reading frame of SEQ ID NO: 4 providing increased expression of the encoded active BoNT/A in an E. coli cell. In another aspect of this embodiment, an expression construct comprises a pET29 expression vector operably linked to a modified open reading frame of SEQ ID NO: 5 providing increased expression of the encoded active BoNT/A in an E. coli cell. In another aspect of this embodiment, an expression construct comprises a pET29 expression vector operably linked to a modified open reading frame of SEQ ID NO: 6 providing increased expression of the encoded active BoNT/A in an E. coli cell. In another aspect of this embodiment, an expression construct comprises a pRSET expression vector operably linked to a modified open reading frame of SEQ ID NO: 3 providing increased expression of the encoded active BoNT/A in an E. coli cell. In another aspect of this embodiment, an expression construct comprises a pRSET expression vector operably linked to a modified open reading frame of SEQ ID NO: 4 providing increased expression of the encoded active BoNT/A in an E. coli cell. In another aspect of this embodiment, an expression construct comprises a pRSET expression vector operably linked to a modified open reading frame of SEQ ID NO: 5 providing increased expression of the encoded active BoNT/A in an E. coli cell. In another aspect of this embodiment, an expression construct comprises a pRSET expression vector operably linked to a modified open reading frame of SEQ ID NO: 6 providing increased expression of the encoded active BoNT/A in an E. coli cell.

[0105] In yet another embodiment disclosed in the present invention, expression constructs disclosed in the present specification are operably linked to control sequences from a eukaryotic expression vector useful for expressing an encoded active BoNT/A in an eukaryotic cell. In an aspect of this embodiment, a nucleic acid molecule disclosed in the present specification is operably linked to control sequences from a yeast expression vector useful for expressing an encoded BoNT/A in a yeast cell. Non-limiting examples of yeast expression vectors include a Pichia pastoris expression vector, a Pichia methanolica expression vector, a Pichia angusta expression vector, a Schizosaccharomyces pombe expression vector, a Saccharomyces cerevisiae expression vector and a Yarrowia lipolytica expression vector. In an aspect of this embodiment, an expression construct comprises a yeast expression vector operably linked to a modified open reading frame providing increased expression of an encoded active BoNT/A in a yeast cell. In an aspect of this embodiment, an expression construct comprises a pPICZ A expression vector and a modified open reading frame providing increased expression of an encoded active BoNT/A in a P. pastoris cell. In another aspect of this embodiment, an expression construct comprises a pPICZ A expression vector operably linked to a modified open reading frame of SEQ ID NO: 34 providing increased expression of the encoded active BoNT/A in a P. pastoris cell. In another aspect of this embodiment, an expression construct comprises a pPICZ A expression vector operably linked to a modified open reading frame of SEQ ID NO: 35 providing increased expression of the encoded active BoNT/A in a P. pastoris cell. In another aspect of this embodiment, an expression construct comprises a pPICZ A expression vector operably linked to a modified open reading frame of SEQ ID NO: 36 providing increased expression of the encoded active BoNT/A in a P. pastoris cell. In another aspect of this embodiment, an expression construct comprises a pMET expression vector and a modified open reading frame providing increased expression of an encoded active BoNT/A in a P. methanolica cell. In another aspect of this embodiment, an expression construct comprises a pMET expression vector operably linked to a modified open reading frame of SEQ ID NO: 34 providing increased expression of the encoded active BoNT/A in a P. methanolica cell. In another aspect of this embodiment, an expression construct comprises a pMET expression vector operably linked to a modified open reading frame of SEQ ID NO: 35 providing increased expression of the encoded active BoNT/A in a P. methanolica cell. In another aspect of this embodiment, an expression construct comprises a PMET expression vector operably linked to a modified open reading frame of SEQ ID NO: 36 providing increased expression of the encoded active BoNT/A in a P. methanolica cell. In yet another aspect of this embodiment, an expression construct comprises a pYES2.1 expression vector and a modified open reading frame providing increased expression of an encoded active BoNT/A in a S. cerevisiae cell. In another aspect of this embodiment, an expression construct comprises a pYES2.1 expression vector operably linked to a modified open reading frame of SEQ ID NO: 37 providing increased expression of the encoded active BoNT/A in a S. cerevisiae cell. In another aspect of this embodiment, an expression construct comprises a pYES2.1 expression vector operably linked to a modified open reading frame of SEQ ID NO: 38 providing increased expression of the encoded active BoNT/A in a S. cerevisiae cell. In another aspect of this embodiment, an expression construct comprises a pYES2.1 expression vector operably linked to a modified open reading frame of SEQ ID NO: 39 providing increased expression of the encoded active BoNT/A in a S. cerevisiae cell.

[0106] In yet another aspect of this embodiment, a nucleic acid molecule disclosed in the present specification is operably linked to control sequences from an insect expression vector useful for expressing an encoded active BoNT/A in an insect cell. Non-limiting examples of an insect expression vector include a Spodoptera frugiperda expression vector, a Trichoplusia ni expression vector, a Drosophila melanogaster expression vector and a Manduca sexta expression vector. In an aspect of this embodiment, an expression construct comprises an insect expression vector operably linked to a modified open reading frame providing increased expression of an encoded active BoNT/A in an insect cell or cell line derived from an insect cell. In an aspect of this embodiment, an expression construct comprises a pFastBac™HT expression vector and a modified open reading frame providing increased expression of an encoded active BoNT/A in an insect cell line, such as, e.g., Sf9, Sf21 and High-Five. In another aspect of this embodiment, an expression construct comprises a pFastBac™HT expression vector operably linked to a modified open reading frame of SEQ ID NO: 61 providing increased expression of the encoded active BoNT/A in an insect cell line, such as, e.g., Sf9, Sf21 and High-Five. In another aspect of this embodiment, an expression construct comprises a pFastBac™HT expression vector operably linked to a modified open reading frame of SEQ ID NO: 62 providing increased expression of the encoded active BoNT/A in an insect cell line, such as, e.g., Sf9, Sf21 and High-Five. In another aspect of this embodiment, an expression construct comprises a pFastBac™HT expression vector operably linked to a modified open reading frame of SEQ ID NO: 63 providing increased expression of the encoded active BoNT/A in an insect cell line, such as, e.g., Sf9, Sf21 and High-Five. In another aspect of this embodiment, an expression construct comprises a pBACgus3 expression vector and a modified open reading frame providing increased expression of an encoded active BoNT/A in an insect cell line, such as, e.g., Sf9, Sf21 and High-Five. In another aspect of this embodiment, an expression construct comprises a pBACgus3 expression vector operably linked to a modified open reading frame of SEQ ID NO: 61 providing increased expression of the encoded active BoNT/A in an insect cell line, such as, e.g., Sf9, Sf21 and High-Five. In another aspect of this embodiment, an expression construct comprises a pBACgus3 expression vector operably linked to a modified open reading frame of SEQ ID NO: 62 providing increased expression of the encoded active BoNT/A in an insect cell line, such as, e.g., Sf9, Sf21 and High-Five. In another aspect of this embodiment, an expression construct comprises a pBACgus3 expression vector operably linked to a modified open reading frame of SEQ ID NO: 63 providing increased expression of the encoded active BoNT/A in an insect cell line, such as, e.g., Sf9, Sf21 and High-Five.

[0107] In an aspect of this embodiment, an expression construct comprises a pMT/BiP-V5-His/GFP expression vector and a modified open reading frame providing increased expression of an encoded active BoNT/A in an insect cell line, such as, e.g., Schneider's Drosophila line 2 (S2) and Kc. In another aspect of this embodiment, an expression construct comprises a pMT/BiP-V5-His/GFP expression vector operably linked to a modified open reading frame of SEQ ID NO: 58 providing increased expression of the encoded active BoNT/A in an insect cell line, such as, e.g., Schneider's Drosophila line 2 (S2) and Kc. In another aspect of this embodiment, an expression construct comprises a pMT/BiP-V5-His/GFP expression vector operably linked to a modified open reading frame of SEQ ID NO: 59 providing increased expression of the encoded active BoNT/A in an insect cell line, such as, e.g., Schneider's Drosophila line 2 (S2) and Kc. In another aspect of this embodiment, an expression construct comprises a pMT/BiP-V5-His/GFP expression vector operably linked to a modified open reading frame of SEQ ID NO: 60 providing increased expression of the encoded active BoNT/A in an insect cell line, such as, e.g., Schneider's Drosophila line 2 (S2) and Kc.

[0108] In yet another aspect of this embodiment, a nucleic acid molecule disclosed in the present specification is operably linked to control sequences from a mammalian expression vector useful for expressing an encoded active BoNT/A in a mammalian cell or cell line derived from a mammalian cell. Expression of a BoNT/A from a mammalian expression vectors can be under the control of a constitutive, tissue-specific, cell-specific or inducible promoter element, enhancer element or both. Non-limiting examples of mammalian expression vectors include a mouse expression vector, a rat expression vector, a hamster expression vector, a porcine expression vector, a bovine expression vector, an equine expression vector, a primate expression vector and a human expression vector. Specific expression vectors include, without limitation, pCMV-Script, pCMVTNT, pDisplay, pSECTag, pSECTag2, pVAX1 and pQBI25. In an aspect of this embodiment, an expression construct comprises a mammalian expression vector operably linked to a modified open reading frame providing increased expression of an encoded active BoNT/A in a mammalian cell or cell line derived from a mammalian cell.

[0109] In an aspect of this embodiment, an expression construct comprises a mouse expression vector operably linked to a modified open reading frame providing increased expression of an encoded active BoNT/A in a mouse cell or cell line derived from a mouse cell. In an aspect of this embodiment, an expression construct comprises a pSECTag2expression vector and a modified open reading frame providing increased expression of an encoded active BoNT/A in a mouse cell line, such as, e.g., 10T1/2, BALB/3T3, L-M, NB4 1A3, NIE-115, NG108-15, NIH3T3, NCTC and Neuro 2A. In another aspect of this embodiment, an expression construct comprises a pSECTag2 expression vector operably linked to a modified open reading frame of SEQ ID NO: 76 providing increased expression of the encoded active BoNT/A in a mouse cell line, such as, e.g., 10T1/2, BALB/3T3, L-M, NB4 1A3, NIE-115, NG108-15, NIH3T3, NCTC and Neuro 2A. In another aspect of this embodiment, an expression construct comprises a pSECTag2 expression vector operably linked to a modified open reading frame of SEQ ID NO: 77 providing increased expression of the encoded active BoNT/A in a mouse cell line, such as, e.g., 10T1/2, BALB/3T3, L-M, NB4 1A3, NIE-115, NG108-15, NIH3T3, NCTC and Neuro 2A. In another aspect of this embodiment, an expression construct comprises a pSECTag2 expression vector operably linked to a modified open reading frame of SEQ ID NO: 78 providing increased expression of the encoded active BoNT/A in a mouse cell line, such as, e.g., 10T1/2, BALB/3T3, L-M, NB4 1A3, NIE-115, NG108-15, NIH3T3, NCTC and Neuro 2A.

[0110] In an aspect of this embodiment, an expression construct comprises a rat expression vector operably linked to a modified open reading frame providing increased expression of an encoded active BoNT/A in a rat cell or cell line derived from a rat cell. In an aspect of this embodiment, an expression construct comprises a pSECTag2 expression vector and a modified open reading frame providing increased expression of an encoded active BoNT/A in a rat cell line, such as, e.g., PC12, GH1, GH3, C6 and L2. In another aspect of this embodiment, an expression construct comprises a pSECTag2 expression vector operably linked to a modified open reading frame of SEQ ID NO: 79 providing increased expression of the encoded active BoNT/A in a rat cell line, such as, e.g., PC12, GH1, GH3, C6 and L2. In another aspect of this embodiment, an expression construct comprises a pSECTag2 expression vector operably linked to a modified open reading frame of SEQ ID NO: 80 providing increased expression of the encoded active BoNT/A in a rat cell line, such as, e.g., PC 2, GH1, GH3, C6 and L2. In another aspect of this embodiment, an expression construct comprises a pSECTag2 expression vector operably linked to a modified open reading frame of SEQ ID NO: 81 providing increased expression of the encoded active BoNT/A in a rat cell line, such as, e.g., PC12, GH1, GH3, C6 and L2.

[0111] In an aspect of this embodiment, an expression construct comprises a hamster expression vector operably linked to a modified open reading frame providing increased expression of an encoded active BoNT/A in a hamster cell or cell line derived from a hamster cell. In an aspect of this embodiment, an expression construct comprises a pSECTag2 expression vebtor and a modified open reading frame providing increased expression of an encoded active BoNT/A in a hamster cell line, such as, e.g., CHO and 6E6. In another aspect of this embodiment, an expression construct comprises a pSECTag2 expression vector operably linked to a modified open reading frame of SEQ ID NO: 82 providing increased expression of the encoded active BoNT/A in a hamster cell line, such as, e.g., CHO and 6E6. In another aspect of this embodiment, an expression construct comprises a pSECTag2 expression vector operably linked to a modified open reading frame of SEQ ID NO: 83 providing increased expression of the encoded active BoNT/A in a hamster cell line, such as, e.g., CHO and 6E6. In another aspect of this embodiment, an expression construct comprises a pSECTag2 expression vector operably linked to a modified open reading frame of SEQ ID NO: 84 providing increased expression of the encoded active BoNT/A in a hamster cell line, such as, e.g., CHO and 6E6.

[0112] In an aspect of this embodiment, an expression construct comprises a porcine expression vector operably linked to a modified open reading frame providing increased expression of an encoded active BoNT/A in a porcine cell or cell line derived from a porcine cell. In an aspect of this embodiment, an expression construct comprises a pSECTag2 expression vector and a modified open reading frame providing increased expression of an encoded active BoNT/A in a porcine cell line, such as, e.g., PK15, LLC-PK1, ST and ESK-4. In another aspect of this embodiment, an expression construct comprises a pSECTag2 expression vector operably linked to a modified open reading frame of SEQ ID NO: 85 providing increased expression of the encoded active BoNT/A in a porcine cell line, such as, e.g., PK15, LLC-PK1, ST and ESK-4. In another aspect of this embodiment, an expression construct comprises a pSECTag2 expression vector operably linked to a modified open reading frame of SEQ ID NO: 86 providing increased expression of the encoded active BoNT/A in a porcine cell line, such as, e.g., PK15, LLC-PK1, ST and ESK-4. In another aspect of this embodiment, an expression construct comprises a pSECTag2 expression vector operably linked to a modified open reading frame of SEQ ID NO: 87 providing increased expression of the encoded active BoNT/A in a porcine cell line, such as, e.g., PK15, LLC-PK1, ST and ESK-4.

[0113] In an aspect of this embodiment, an expression construct comprises a bovine expression vector operably linked to a modified open reading frame providing increased expression of an encoded active BoNT/A in a bovine cell or cell line derived from a bovine cell. In an aspect of this embodiment, an expression construct comprises a pSECTag2 expression vector and a modified open reading frame providing increased expression of an encoded active BoNT/A in a bovine cell line, such as, e.g., CPAE, BT, SBAC and FB2. In another aspect of this embodiment, an expression construct comprises a pSECTag2 expression vector operably linked to a modified open reading frame of SEQ ID NO: 88 providing increased expression of the encoded active BoNT/A in a bovine cell line, such as, e.g., CPAE, BT, SBAC and FB2. In another aspect of this embodiment, an expression construct comprises a pSECTag2 expression vector operably linked to a modified open reading frame of SEQ ID NO: 89 providing increased expression of the encoded active BoNT/A in a bovine cell line, such as, e.g., CPAE, BT, SBAC and FB2. In another aspect of this embodiment, an expression construct comprises a pSECTag2 expression vector operably linked to a modified open reading frame of SEQ ID NO: 90 providing increased expression of the encoded active BoNT/A in a bovine cell line, such as, e.g., CPAE, BT, SBAC and FB2.

[0114] In an aspect of this embodiment, an expression construct comprises an equine expression vector operably linked to a modified open reading frame providing increased expression of an encoded active BoNT/A in an equine cell or cell line derived from an equine cell. In an aspect of this embodiment, an expression construct comprises a pSECTag2 expression vector and a modified open reading frame providing increased expression of an encoded active BoNT/A in an equine cell line, such as, e.g., NBL-6. In another aspect of this embodiment, an expression construct comprises a pSECTag2 expression vector operably linked to a modified open reading frame of SEQ ID NO: 91 providing increased expression of the encoded active BoNT/A in an equine cell line, such as, e.g., NBL-6. In another aspect of this embodiment, an expression construct comprises a pSECTag2 expression vector operably linked to a modified open reading frame of SEQ ID NO: 92 providing increased expression of the encoded active BoNT/A in an equine cell line, such as, e.g., NBL-6. In another aspect of this embodiment, an expression construct comprises a pSECTag2 expression vector operably linked to a modified open reading frame of SEQ ID NO: 93 providing increased expression of the encoded active BoNT/A in an equine cell line, such as, e.g., NBL-6.

[0115] In an aspect of this embodiment, an expression construct comprises a primate expression vector operably linked to a modified open reading frame providing increased expression of an encoded active BoNT/A in a primate cell or cell line derived from a primate cell. In an aspect of this embodiment, an expression construct comprises a pSECTag2 expression vector and a modified open reading frame providing increased expression of an encoded active BoNT/A in a primate cell line, such as, e.g., COS-1, COS-7 and VV-1. In another aspect of this embodiment, an expression construct comprises a pSECTag2 expression vector operably linked to a modified open reading frame of SEQ ID NO: 94 providing increased expression of the encoded active BoNT/A in a primate cell line, such as, e.g., COS-1, COS-7 and VV-1. In another aspect of this embodiment, an expression construct comprises a pSECTag2 expression vector operably linked to a modified open reading frame of SEQ ID NO: 95 providing increased expression of the encoded active BoNT/A in a primate cell line, such as, e.g., COS-1, COS-7 and VV-1. In another aspect of this embodiment, an expression construct comprises a pSECTag2 expression vector operably linked to a modified open reading frame of SEQ ID NO: 96 providing increased expression of the encoded active BoNT/A in a primate cell line, such as, e.g., COS-1, COS-7 and VV-1.

[0116] In an aspect of this embodiment, an expression construct comprises a human expression vector operably linked to a modified open reading frame providing increased expression of an encoded active BoNT/A in a human cell or cell line derived from a human cell. In an aspect of this embodiment, an expression construct comprises a pSECTag2 expression vector and a modified open reading frame providing increased expression of an encoded active BoNT/A in a primate cell line, such as, e.g., SH-SY5Y, SK-N-DZ, SK-N-F1, SK-N-SH, BE (2)-C, HeLa, HEK 293, MCF-7, HepG2, HL-60, IMR-32, SW-13 and CHP3. In another aspect of this embodiment, an expression construct comprises a pSECTag2 expression vector operably linked to a modified open reading frame of SEQ ID NO: 97 providing increased expression of the encoded active BoNT/A in a primate cell line, such as, e.g., SH-SY5Y, SK-N-DZ, SK-N-F1, SK-N-SH, BE (2)-C, HeLa, HEK 293, MCF-7, HepG2, HL-60, IMR-32, SW-13 and CHP3. In another aspect of this embodiment, an expression construct comprises a pSECTag2 expression vector operably linked to a modified open reading frame of SEQ ID NO: 98 providing increased expression of the encoded active BoNT/A in a primate cell line, such as, e.g., SH-SY5Y, SK-N-DZ, SK-N-F1, SK-N-SH, BE (2)-C, HeLa, HEK 293, MCF-7, HepG2, HL-60, IMR-32, SW-13 and CHP3. In another aspect of this embodiment, an expression construct comprises a pSECTag2 expression vector operably linked to a modified open reading frame of SEQ ID NO: 99 providing increased expression of the encoded active BoNT/A in a primate cell line, such as, e.g., SH-SY5Y, SK-N-DZ, SK-N-F1, SK-N-SH, BE (2)-C, HeLa, HEK 293, MCF-7, HepG2, HL-60, IMR-32, SW-13 and CHP3.

[0117] Aspects of the present invention further provide cells comprising an expression construct disclosed in the present specification. It is envisioned that a cell can include, without limitation, a prokaryotic cell containing a prokaryotic expression construct useful for expressing a nucleic acid molecule comprising a modified open reading frame providing increased expression of the encoded active BoNT/A in a prokaryotic cell; a yeast cell containing a yeast expression construct useful for expressing a nucleic acid molecule comprising a modified open reading frame providing increased expression of the encoded active BoNT/A in a yeast cell; an insect cell containing an insect expression construct useful for expressing a nucleic acid molecule comprising a modified open reading frame providing increased expression of the encoded active BoNT/A in an insect cell; and a mammalian cell containing a mammalian expression construct useful for expressing a nucleic acid molecule comprising a modified open reading frame providing increased expression of the encoded active BoNT/A in a mammalian cell.

[0118] The cells disclosed in the present specification include, in part, an expression construct. It is envisioned that any and all expression constructs disclosed in the present specification can be used. Thus, aspects of this embodiment include, without limitation, cells comprising a viral expression vector operably linked to a modified open reading frame providing increased expression of an encoded active BoNT/A in a mammalian cell; a prokaryotic expression vector operably linked to a modified open reading frame providing increased expression of an encoded active BoNT/A in a prokaryotic cell; cells comprising a yeast expression vector operably linked to a modified open reading frame providing increased expression of an encoded active BoNT/A in a yeast cell; cells comprising a slime mold expression vector operably linked to a modified open reading frame providing increased expression of an encoded active BoNT/A in an slime mold cell; cells comprising a plant expression vector operably linked to a modified open reading frame providing increased expression of an encoded active BoNT/A in a plant cell or cell line derived from a plant cell; cells comprising an insect expression vector operably linked to a modified open reading frame providing increased expression of the encoded active BoNT/A in an insect cell or cell line derived from an insect cell; cells comprising a fish expression vector operably linked to a modified open reading frame providing increased expression of an encoded active BoNT/A in an fish cell or cell line derived from a fish cell; cells comprising an amphibian expression vector operably linked to a modified open reading frame providing increased expression of an encoded active BoNT/A in an amphibian cell or cell line derived from an amphibian cell; cells comprising a bird expression vector operably linked to a modified open reading frame providing increased expression of an encoded active BoNT/A in a bird cell or cell line derived from a bird cell; and cells comprising a mammalian expression vector operably linked to a modified open reading frame providing increased expression of an encoded active BoNT/A in a mammalian cell or cell line derived from a mammalian cell, such as, e.g., mouse, rat, hamster, porcine, bovine, equine, primate and human. Other aspects of this embodiment include, without limitation, expression constructs comprising a modified open reading frame that comprises any one of SEQ ID NO: 3 through SEQ ID NO: 99, SEQ ID NO: 110, SEQ ID NO: 112 and SEQ ID NO: 122 through SEQ ID NO: 125.

[0119] The cells disclosed in the present specification include, in part, a heterologous cell. It is envisioned that any and all heterologous cells disclosed in the present specification can be used. Thus, aspects of this embodiment include, without limitation, prokaryotic cells including, without limitation, strains of aerobic, microaerophilic, capnophilic, facultative, anaerobic, gram-negative and gram-positive bacterial cells such as those derived from, e.g., Escherichia coli, Bacillus subtilis, Bacillus licheniformis, Bacteroides fragilis, Clostridia perfringens, Clostridia difficile, Caulobacter crescentus, Lactococcus lactis, Methylobacterium extorquens, Neisseria meningirulls, Neisseria meningitidis, Pseudomonas fluorescens and Salmonella typhimurium; and eukaryotic cells including, without limitation, yeast strains, such as, e.g., those derived from Pichia pastoris, Pichia methanolica, Pichia angusta, Schizosaccharomyces pombe, Saccharomyces cerevisiae and Yarrowia lipolytica; slime mold strains, such as, e.g., those derived from, e.g., Dictyostelium discoideum; plant cells and cell lines derived from plant cells, such as, e.g., those derived from species of monocots, species of dicots, Zea mays and Arabidopsis thaliana; insect cells and cell lines derived from insects, such as, e.g., those derived from Spodoptera frugiperda, Trichoplusia ni, Drosophila melanogaster and Manduca sexta; fish cells and cell lines derived from fish cells, such as, e.g., those derived from Denio renia; amphibian cells and cell lines derived from amphibian cells, such as, e.g., those derived from Xenopus laevis and Xenopus tropicalis; bird cells and cell lines derived from bird cells, such as, e.g., those derived from Gallus gallus; mammalian cells and cell lines derived from mammalian cells, such as, e.g., those derived from mouse, rat, hamster, porcine, bovine, equine, primate and human. Cell lines may be obtained from the American Type Culture Collection (2004), at URL address www.atcc.org; European Collection of Cell Cultures (2204), at URL address www.ecacc.org.uk; and the German Collection of Microorganisms and Cell Cultures (2004), at URL address www.dsmz.de. Non-limiting examples of specific protocols for selecting, making and using an appropriate cell line are described in e.g., INSECT CELL CULTURE ENGINEERING (Mattheus F. A. Goosen et al. eds., Marcel Dekker, 1993); INSECT CELL CULTURES: FUNDAMENTAL AND APPLIED ASPECTS (J. M. Vlak et al. eds., Kluwer Academic Publishers, 1996); Maureen A. Harrison & Ian F. Rae, GENERAL TECHNIQUES OF CELL CULTURE (Cambridge University Press, 1997); CELL AND TISSUE CULTURE: LABORATORY PROCEDURES (Alan Doyle et al eds., John Wiley and Sons, 1998); R. Ian Freshney, CULTURE OF ANIMAL CELLS: A MANUAL OF BASIC TECHNIQUE (Wiley-Liss, 4^{th} ed. 2000); ANIMAL CELL CULTURE: A PRACTICAL APPROACH (John R. W. Masters ed., Oxford University Press, 3^{rd} ed. 2000); MOLECULAR CLONING A LABORATORY MANUAL, supra, (2001); BASIC CELL CULTURE: A PRACTICAL APPROACH (John M. Davis, Oxford Press, 2^{nd} ed. 2002); and CURRENT PROTOCOLS IN MOLECULAR BIOLOGY, supra, (2004). These protocols are routine procedures within the scope of one skilled in the art and from the teaching herein.

[0120] It is envisioned that any and all methods for introducing an expression construct disclosed in the present specification into a cell can be used. A cell disclosed in the present specification can maintain an expression construct transiently or stably. Stably-maintained constructs may be extra-chromosomal and replicate autonomously, or they may be integrated into the chromosomal material of the cell and replicate non-autonomously. Methods useful for introducing a nucleic acid molecule into a cell including, without limitation, calcium phosphate-mediated, DEAE dextran-mediated, lipid-mediated, polybrene-mediated, polylysine-mediated, viral-mediated, microinjection, protoplast fusion, biolistic, and electroporation, see, e.g., Introducing Cloned Genes into Cultured Mammalian Cells, pp. 16.1-16.62 (Sambrook & Russell, eds., MOLECULAR CLONING: A LABORATORY MANUAL, Vol. 3, ₃rd ed. 2001). One skilled in the art understands that selection of a specific method to introduce an expression construct into a cell will depend, in part, on whether the cell will transiently contain an expression construct or whether the cell will stably contain an expression construct. These protocols are routine procedures within the scope of one skilled in the art and from the teaching herein.

[0121] In an aspect of this embodiment, a chemical-mediated method, termed transfection, is used to introduce a construct expressing an active BoNT/A into a heterologous cell. In chemical-mediated methods of transfection the chemical reagent forms a complex with the nucleic acid that facilitates its uptake into the cells. Such chemical reagents include, without limitation, calcium phosphate-mediated, see, e.g., Martin Jordan & Florian Worm, Transfection of adherent and suspended cells by calcium phosphate, 33(2) Methods 136-143 (2004); diethyl-aminoethyl (DEAE) dextran-mediated, lipid-mediated, cationic polymer-mediated like polyethyleneimine (PEI)-mediated and polylysine-mediated and polybrene-mediated, see, e.g., Chun Zhang et al., Polyethylenimine strategies for plasmid delivery to brain-derived cells, 33(2) Methods 144-150 (2004). Such chemical-mediated delivery systems can be prepared by standard methods and are commercially available, see, e.g., CellPhect Transfection Kit (Amersham Biosciences, Piscataway, N.J.); Mammalian Transfection Kit, Calcium phosphate and DEAE Dextran, (Stratagene, Inc., La Jolla, Calif.); Lipofectamine™ Transfection Reagent (Invitrogen, Inc., Carlsbad, Calif.); ExGen 500 Transfection kit (Fermentas, Inc., Hanover, Md.), and SuperFect and Effectene Transfection Kits (Qiagen, Inc., Valencia, Calif.).

[0122] In another aspect of this embodiment, a physical-mediated method is used to introduce a construct expressing an active BoNT/A into a heterologous cell. Physical reagents include, without limitation, electroporation, biolistic and microinjection. Biolistics and microinjection techniques perforate the cell wall in order to introduce the nucleic acid molecule into the cell, see, e.g., Jeike E. Biewenga et al., Plasmid-mediated gene transfer in neurons using the biolistics technique, 71 (1) J. Neurosci. Methods. 67-75 (1997); and John O'Brien & Sarah C. R. Lummis, Biolistic and diolistic transfection: using the gene gun to deliver DNA and lipophilic dyes into mammalian cells, 33(2) Methods 121-125 (2004). Electroporation, also termed electropermeabilization, uses brief, high-voltage, electrical pulses to create transient pores in the membrane through which the nucleic acid molecules enter and can be used effectively for stable and transient transfections of all cell types, see, e.g., M. Golzio et al., In vitro and in vivo electric field-mediated permeabilization, gene transfer, and expression, 33(2) Methods 126-135 (2004); and Oliver Greschet al., New non-viral method for gene transfer into primary cells, 33(2) Methods 151-163 (2004).

[0123] In another aspect of this embodiment, a viral-mediated method, termed transduction, is used to introduce a construct expressing an active BoNT/A into a heterologous cell. In viral-mediated methods of transient transduction, the process by which viral particles infect and replicate in a host cell has been manipulated in order to use this mechanism to introduce a nucleic acid molecule into the cell. Viral-mediated methods have been developed from a wide variety of viruses including, without limitation, retroviruses, adenoviruses, adeno-associated viruses, herpes simplex viruses, picornaviruses, alphaviruses and baculoviruses, see, e.g., Armin Blesch, Lentiviral and MLV based retroviral vectors for ex vivo and in vivo gene transfer, 33(2) Methods 164-172 (2004); and Maurizio Federico, From lentiviruses to lentivirus vectors, 229 Methods Mol. Biol. 3-15 (2003); E. M. Poeschla, Non-primate lentiviral vectors, 5(5) Curr. Opin. Mol. Ther. 529-540 (2003); Karim Benihoud et al, Adenovirus vectors for gene delivery, 10(5) Curr. Opin. Biotechnol. 440-447 (1999); H. Bueler, Adeno-associated viral vectors for gene transfer and gene therapy, 380(6) Biol. Chem. 613-622 (1999); Chooi M. Lai et al., Adenovirus and adeno-associated virus vectors, 21(12) DNA Cell Biol. 895-913 (2002); Edward A. Burton et al., Gene delivery using herpes simplex virus vectors, 21(12) DNA Cell Biol. 915-936 (2002); Paola Grandi et al., Targeting HSV amplicon vectors, 33(2) Methods 179-186 (2004); Ilya Frolov et al., Alphavirus-based expression vectors: strategies and applications, 93(21) Proc. Natl. Acad. Sci. U. S. A. 11371-11377 (1996); Markus U. Ehrengruber, Alphaviral gene transfer in neurobiology, 59(1) Brain Res. Bull. 13-22 (2002); Thomas A. Kost & J. Patrick Condreay, Recombinant baculoviruses as mammalian cell gene-delivery vectors, 20(4) Trends Biotechnol. 173-180 (2002); and A. Huser & C. Hofmann, Baculovirus vectors: novel mammalian cell gene-delivery vehicles and their applications, 3(1) Am. J. Pharmacogenomics 53-63 (2003).

[0124] Adenoviruses, which are non-enveloped, double-stranded DNA viruses, are often selected for mammalian cell transduction because adenoviruses handle relatively large nucleic acid molecules of about 36 kd, are produced at high titer, and can efficiently infect a wide variety of both dividing and non-dividing cells, see, e.g., Wim T. J. M. C. Hermens et al., Transient gene transfer to neurons and glia: analysis of adenoviral vector performance in the CNS and PNS, 71 (1) J. Neurosci. Methods 85-98 (1997); and Hiroyuki Mizuguchi et al., Approaches for generating recombinant adenovirus vectors, 52(3) Adv. Drug Deliv. Rev. 165-176 (2001). Transduction using adenoviral-based system do not support prolonged protein expression because the nucleic acid molecule is carried from an episome in the cell nucleus, rather than being integrated into the host cell chromosome. Adenovirual vector systems and specific protocols for how to use such vectors are disclosed in, e.g., ViraPower™ Adenoviral Expression System (Invitrogen, Inc., Carlsbad, Calif.) and ViraPower™ Adenoviral Expression System Instruction Manual 25-0543 version A, Invitrogen, Inc., (Jul. 15, 2002); and AdEasy™ Adenoviral Vector System (Stratagene, Inc., La Jolla, Calif.) and AdEasy™ Adenoviral Vector System Instruction Manual 064004f, Stratagene, Inc..

[0125] Nucleic acid molecule delivery can also use single-stranded RNA retroviruses, such as, e.g., oncoretroviruses and lentiviruses. Retroviral-mediated transduction often produce transduction efficiencies close to 100%, can easily control the proviral copy number by varying the multiplicity of infection (MOI), and can be used to either transiently or stably transduce cells, see, e.g., Tiziana Tonini et al., Transient production of retroviral- and lentiviral-based vectors for the transduction of Mammalian cells, 285 Methods Mol. Biol. 141-148 (2004); Armin Blesch, Lentiviral and MLV based retroviral vectors for ex vivo and in vivo gene transfer, 33(2) Methods 164-172 (2004); Félix Recillas-Targa, Gene transfer and expression in mammalian cell lines and transgenic animals, 267 Methods Mol. Biol. 417-433 (2004); and Roland Wolkowicz et al., Lentiviral vectors for the delivery of DNA into mammalian cells, 246 Methods Mol. Biol. 391-411 (2004). Retroviral particles consist of an RNA genome packaged in a protein capsid, surrounded by a lipid envelope. The retrovirus infects a host cell by injecting its RNA into the cytoplasm along with the reverse transcriptase enzyme. The RNA template is then reverse transcribed into a linear, double stranded cDNA that replicates itself by integrating into the host cell genome. Viral particles are spread both vertically (from parent cell to daughter cells via the provirus) as well as horizontally (from cell to cell via virions). This replication strategy enables long-term persist expression since the nucleic acid molecules of interest are stably integrated into a chromosome of the host cell, thereby enabling long-term expression of the protein. For instance, animal studies have shown that lentiviral vectors injected into a variety of tissues produced sustained protein expression for more than 1 year, see, e.g., Luigi Naldini et al., In vivo gene delivery and stable transduction of non-dividing cells by a lentiviral vector, 272(5259) Science 263-267 (1996). The Oncoretroviruses-derived vector systems, such as, e.g., Moloney murine leukemia virus (MoMLV), are widely used and infect many different non-dividing cells. Lentiviruses can also infect many different cell types, including dividing and non-dividing cells and possess complex envelope proteins, which allows for highly specific cellular targeting.

[0126] Retroviral vectors and specific protocols for how to use such vectors are disclosed in, e.g., U.S. Pat. Nos. Manfred Gossen & Hermann Bujard, Tight control of gene expression in eukaryotic cells by tetracycline-responsive promoters, U.S. Pat. No. 5,464,758 (Nov. 7, 1995) and Hermann Bujard & Manfred Gossen, Methods for regulating gene expression, U.S. Pat. No. 5,814,618 (Sep. 29, 1998) David S. Hogness, Polynucleotides encoding insect steroid hormone receptor polypeptides and cells transformed with same, U.S. Pat. No. 5,514,578 (May 7, 1996) and David S. Hogness, Polynucleotide encoding insect ecdysone receptor, U.S. Pat. No. 6,245,531 (Jun. 12, 2001); Elisabefta Vegeto et al., Progesterone receptor having C. terminal hormone binding domain truncations, U.S. Pat. No. 5,364,791 (Nov. 15, 1994), Elisabetta Vegeto et al., Mutated steroid hormone receptors, methods for their use and molecular switch for gene therapy, U.S. Pat. No. 5,874,534 (Feb. 23, 1999) and Elisabetta Vegeto et al., Mutated steroid hormone receptors, methods for their use and molecular switch for gene therapy, U.S. Pat. No. 5,935,934 (Aug. 10, 1999). Furthermore, such viral delivery systems can be prepared by standard methods and are commercially available, see, e.g., BD™ Tet-Off and Tet-On Gene Expression Systems (BD Biosciences-Clonetech, Palo Alto, Calif.) and BD™ Tet-Off and Tet-On Gene Expression Systems User Manual, PT3001-1, BD Biosciences Clonetech, (Mar. 14, 2003), GeneSwitch™ System (Invitrogen, Inc., Carlsbad, Calif.) and GeneSwitch™ System A Mifepristone-Regulated Expression System for Mammalian Cells version D, 25-0313, Invitrogen, Inc., (Nov. 4, 2002); ViraPower™ Lentiviral Expression System (Invitrogen, Inc., Carlsbad, Calif.) and ViraPower™ Lentiviral Expression System Instruction Manual 25-0501 version E, Invitrogen, Inc., (Dec. 8, 2003); and Complete Control® Retroviral Inducible Mammalian Expression System (Stratagene, La Jolla, Calif.) and Complete Control® Retroviral Inducible Mammalian Expression System Instruction Manual, 064005e.

[0127] Thus, in an embodiment, a cell comprises a mammalian cell comprising an expression construct operably linked to a nucleic acid molecule comprising a modified open reading frame providing increased expression of the encoded active BoNT/A in a mammalian cell. In an aspect of this embodiment, a cell comprises a mammalian cell transiently containing an expression construct operably linked to a nucleic acid molecule comprising a modified open reading frame providing increased expression of the encoded active BoNT/A in a mammalian cell. In another aspect of this embodiment, a cell comprises a mammalian cell stably containing an expression construct operably linked to a nucleic acid molecule comprising a modified open reading frame providing increased expression of the encoded active BoNT/A in a mammalian cell. In yet another aspect of this embodiment, an expression construct is a viral expression construct. In further aspect of this embodiment, a viral expression construct is a lentivirus expression construct, a fowl pox virus expression construct, a pseudorabies virus expression construct, a retrovirus expression construct, a semliki forest virus expression construct, a sindbis virus expression construct, a vaccinia virus expression construct, or an adenovirus expression construct. In yet other aspect of this embodiment, a nucleic acid molecule comprises any of the modified open reading frames of SEQ ID NO: 64 through SEQ ID NO: 99.

[0128] Thus, in an embodiment, a cell comprises a prokaryotic cell comprising an expression construct operably linked to a nucleic acid molecule comprising a modified open reading frame providing increased expression of the encoded active BoNT/A in a prokaryotic cell. In an aspect of this embodiment, a cell comprises a prokaryotic cell transiently containing an expression construct operably linked to a nucleic acid molecule comprising a modified open reading frame providing increased expression of the encoded active BoNT/A in a prokaryotic cell. In another aspect of this embodiment, a cell comprises a prokaryotic cell stably containing an expression construct operably linked to a nucleic acid molecule comprising a modified open reading frame providing increased expression of the encoded active BoNT/A in a prokaryotic cell. In a further aspect of this embodiment, a prokaryotic cell is derived from an aerobic bacterium, a microaerophilic bacterium, a capnophilic bacterium, a facultative bacterium, an anaerobic bacterium, a gram-negative bacterium or a gram-positive bacterium. In a further aspect of this embodiment, a prokaryotic cell is a prokaryotic strain derived from Escherichia coli, Bacillus subtilis, Bacillus licheniformis, Bacteroides fragilis, Clostridia perfringens, Clostridia difficile, Caulobacter crescentus, Lactococcus lactis, Methylobacterium extorquens, Neisseria meningirulls, Neisseria meningitidis, Pseudomonas fluorescens and Salmonella typhimurium. In yet another aspect of this embodiment, an expression construct is a prokaryotic expression construct. In yet another aspect of this embodiment, a nucleic acid molecule comprises any of the modified open reading frames of SEQ ID NO: 3 through SEQ ID NO: 33, SEQ ID NO: 110, SEQ ID NO: 112 and SEQ ID NO: 122 through SEQ ID NO: 125.

[0129] In an embodiment, a cell comprises an eukaryotic cell comprising an expression construct operably linked to a nucleic acid molecule comprising a modified open reading frame providing increased expression of the encoded active BoNT/A in an eukaryotic cell. In an aspect of this embodiment, a cell comprises an eukaryotic cell transiently containing an expression construct operably linked to a nucleic acid molecule comprising a modified open reading frame providing increased expression of the encoded active BoNT/A in an eukaryotic cell. In another aspect of this embodiment, a cell comprises an eukaryotic cell stably containing an expression construct operably linked to a nucleic acid molecule comprising a modified open reading frame providing increased expression of the encoded active BoNT/A in an eukaryotic cell. In yet another aspect of this embodiment, an expression construct is an eukaryotic expression construct. In yet other aspect of this embodiment, a nucleic acid molecule comprises any of the modified open reading frames of SEQ ID NO: 34 through SEQ ID NO: 99.

[0130] In an embodiment, a cell comprises a yeast cell comprising an expression construct operably linked to a nucleic acid molecule comprising a modified open reading frame providing increased expression of the encoded active BoNT/A in a yeast cell. In an aspect of this embodiment, a cell comprises a yeast cell transiently containing an expression construct operably linked to a nucleic acid molecule comprising a modified open reading frame providing increased expression of the encoded active BoNT/A in a yeast cell. In another aspect of this embodiment, a cell comprises a yeast cell stably containing an expression construct operably linked to a nucleic acid molecule comprising a modified open reading frame providing increased expression of the encoded active BoNT/A in a yeast cell. In a further aspect of this embodiment, a yeast cell is a yeast strain derived from Pichia pastoris, Pichia methanolica, Pichia angusta, Schizosaccharomyces pombe, Saccharomyces cerevisiae or Yarrowia lipolytica. In yet another aspect of this embodiment, an expression construct is a yeast expression construct. In yet another aspect of this embodiment, a nucleic acid molecule comprises any of the modified open reading frames of SEQ ID NO: 34 through SEQ ID NO: 45.

[0131] In an embodiment, a cell comprises a slime mold cell comprising an expression construct operably linked to a nucleic acid molecule comprising a modified open reading frame providing increased expression of the encoded active BoNT/A in a slime mold cell. In an aspect of this embodiment, a cell comprises a slime mold cell transiently containing an expression construct operably linked to a nucleic acid molecule comprising a modified open reading frame providing increased expression of the encoded active BoNT/A in a slime mold cell. In another aspect of this embodiment, a cell comprises a slime mold cell stably containing an expression construct operably linked to a nucleic acid molecule comprising a modified open reading frame providing increased expression of the encoded active BoNT/A in a slime mold cell. In a further aspect of this embodiment, a slime mold cell is a slime mold strain derived from Dictyostelium discoideum. In yet another aspect of this embodiment, an expression construct is a slime mold expression construct. In yet another aspect of this embodiment, a nucleic acid molecule comprises any of the modified open reading frames of SEQ ID NO: 46 through SEQ ID NO: 48.

[0132] In an embodiment, a cell comprises a plant cell comprising an expression construct operably linked to a nucleic acid molecule comprising a modified open reading frame providing increased expression of the encoded active BoNT/A in a plant cell. In an aspect of this embodiment, a cell comprises a plant cell transiently containing an expression construct operably linked to a nucleic acid molecule comprising a modified open reading frame providing increased expression of the encoded active BoNT/A in a plant cell. In another aspect of this embodiment, a cell comprises a plant cell stably containing an expression construct operably linked to a nucleic acid molecule comprising a modified open reading frame providing increased expression of the encoded active BoNT/A in a plant cell. In a further aspect of this embodiment, a plant cell is derived from a monocot cell or cell line derived from a monocot cell or a dicot cell or cell line derived from a dicot cell. In a further aspect of this embodiment, a plant cell or cell line derived from a plant cell is from Zea mays, Arabidopsis thaliana or Triticum aestivum In yet another aspect of this embodiment, an expression construct is a plant expression construct. In yet another aspect of this embodiment, a nucleic acid molecule comprises any of the modified open reading frames of SEQ ID NO: 49 through SEQ ID NO: 57.

[0133] In an embodiment, a cell comprises an insect cell comprising an expression construct operably linked to a nucleic acid molecule comprising a modified open reading frame providing increased expression of the encoded active BoNT/A in an insect cell. In an aspect of this embodiment, a cell comprises an insect cell transiently containing an expression construct operably linked to a nucleic acid molecule comprising a modified open reading frame providing increased expression of the encoded active BoNT/A in an insect cell. In another aspect of this embodiment, a cell comprises an insect cell stably containing an expression construct operably linked to a nucleic acid molecule comprising a modified open reading frame providing increased expression of the encoded active BoNT/A in an insect cell. In a further aspect of this embodiment, an insect cell is an insect strain derived from Spodoptera frugiperda, Trichoplusia ni, Drosophila melanogaster or Manduca sexta. In a further aspect of this embodiment, an insect cell is an insect cell line derived from Sf9, Sf21, High-five, S2 and Kc. In yet another aspect of this embodiment, an expression construct is an insect expression construct. In yet another aspect of this embodiment, a nucleic acid molecule comprises any of the modified open reading frames of SEQ ID NO: 58 through SEQ ID NO: 63. In additional aspects of this embodiment, a Sf9 cell line contains an expression construct operably linked to a nucleic acid molecule comprising a modified open reading frame of SEQ ID NO: 61, SEQ ID NO: 62 or SEQ ID NO: 63; a Sf21 cell line contains an expression construct operably linked to a nucleic acid molecule comprising a modified open reading frame of SEQ ID NO: 61, SEQ ID NO: 62 or SEQ ID NO: 63; a High-Five cell line contains an expression construct operably linked to a nucleic acid molecule comprising a modified open reading frame of SEQ ID NO: 61, SEQ ID NO: 62 or SEQ ID NO: 63; a S2 cell line contains an expression construct operably linked to a nucleic acid molecule comprising a modified open reading frame of SEQ ID NO: 58, SEQ ID NO: 59 or SEQ ID NO: 60; or a Kc cell line contains an expression construct operably linked to a nucleic acid molecule comprising a modified open reading frame of SEQ ID NO: 58, SEQ ID NO: 59 or SEQ ID NO: 60.

[0134] In an embodiment, a cell comprises a fish cell comprising an expression construct operably linked to a nucleic acid molecule comprising a modified open reading frame providing increased expression of the encoded active BoNT/A in a fish cell. In an aspect of this embodiment, a cell comprises a fish cell transiently containing an expression construct operably linked to a nucleic acid molecule comprising a modified open reading frame providing increased expression of the encoded active BoNT/A in a fish cell. In another aspect of this embodiment, a cell comprises a fish cell stably containing an expression construct operably linked to a nucleic acid molecule comprising a modified open reading frame providing increased expression of the encoded active BoNT/A in a fish cell. In a further aspect of this embodiment, a fish cell is a fish cell or cell line derived from a fish cell from Denio renia. In yet another aspect of this embodiment, an expression construct is a fish expression construct. In yet another aspect of this embodiment, a nucleic acid molecule comprises any of the modified open reading frames of SEQ ID NO: 64 through SEQ ID NO: 66.

[0135] In an embodiment, a cell comprises an amphibian cell comprising an expression construct operably linked to a nucleic acid molecule comprising a modified open reading frame providing increased expression of the encoded active BoNT/A in an amphibian cell. In an aspect of this embodiment, a cell comprises an amphibian cell transiently containing an expression construct operably linked to a nucleic acid molecule comprising a modified open reading frame providing increased expression of the encoded active BoNT/A in an amphibian cell. In another aspect of this embodiment, a cell comprises an amphibian cell stably containing an expression construct operably linked to a nucleic acid molecule comprising a modified open reading frame providing increased expression of the encoded active BoNT/A in an amphibian cell. In a further aspect of this embodiment, an amphibian cell is an amphibian cell or cell line derived from an amphibian cell from Xenopus laevis. In a further aspect of this embodiment, an amphibian cell is an amphibian cell or cell line derived from an amphibian cell from Xenopus tropicalis. In yet another aspect of this embodiment, an expression construct is an amphibian expression construct. In yet another aspect of this embodiment, a nucleic acid molecule comprises any of the modified open reading frames of SEQ ID NO: 67 through SEQ ID NO: 72.

[0136] In an embodiment, a cell comprises a bird cell comprising an expression construct operably linked to a nucleic acid molecule comprising a modified open reading frame providing increased expression of the encoded active BoNT/A in a bird cell. In an aspect of this embodiment, a cell comprises a bird cell transiently containing an expression construct operably linked to a nucleic acid molecule comprising a modified open reading frame providing increased expression of the encoded active BoNT/A in a bird cell. In another aspect of this embodiment, a cell comprises a bird cell stably containing an expression construct operably linked to a nucleic acid molecule comprising a modified open reading frame providing increased expression of the encoded active BoNT/A in a bird cell. In a further aspect of this embodiment, a bird cell is a bird cell or cell line derived from a bird cell from Gallus gallus. In yet another aspect of this embodiment, an expression construct is a bird expression construct. In yet another aspect of this embodiment, a nucleic acid molecule comprises any of the modified open reading frames of SEQ ID NO: 73 through SEQ ID NO: 75.

[0137] In an embodiment, a cell comprises a mammalian cell comprising an expression construct operably linked to a nucleic acid molecule comprising a modified open reading frame providing increased expression of the encoded active BoNT/A in a mammalian cell. In an aspect of this embodiment, a cell comprises a mammalian cell transiently containing an expression construct operably linked to a nucleic acid molecule comprising a modified open reading frame providing increased expression of the encoded active BoNT/A in a mammalian cell. In another aspect of this embodiment, a cell comprises a mammalian cell stably containing an expression construct operably linked to a nucleic acid molecule comprising a modified open reading frame providing increased expression of the encoded active BoNT/A in a mammalian cell. In a further aspect of this embodiment, a mammalian cell is a mammalian cell or cell line derived from a mammalian cell from a mouse, a rat, a hamster, a porcine, a bovine, an equine, a primate or a human. In yet another aspect of this embodiment, an expression construct is a mammalian expression construct. In yet another aspect of this embodiment, a nucleic acid molecule comprises any of the modified open reading frames of SEQ ID NO: 76 through SEQ ID NO: 99.

[0138] In an embodiment, a cell comprises a mouse cell comprising an expression construct operably linked to a nucleic acid molecule comprising a modified open reading frame providing increased expression of the encoded active BoNT/A in a mouse cell. In an aspect of this embodiment, a cell comprises a mouse cell transiently containing an expression construct operably linked to a nucleic acid molecule comprising a modified open reading frame providing increased expression of the encoded active BoNT/A in a mouse cell. In another aspect of this embodiment, a cell comprises a mouse cell stably containing an expression construct operably linked to a nucleic acid molecule comprising a modified open reading frame providing increased expression of the encoded active BoNT/A in a mouse cell. In a further aspect of this embodiment, a mouse cell is a mouse cell or cell line derived from a mouse cell from M. musculus. In a further aspect of this embodiment, a mouse cell is a mouse cell line derived from 10T1/2, BALB/3T3, L-M, NB4 1A3, NIE-115, NG108-15, NIH3T3, NCTC or Neuro 2A. In yet another aspect of this embodiment, an expression construct is a mouse expression construct. In yet another aspect of this embodiment, a nucleic acid molecule comprises any of the modified open reading frames of SEQ ID NO: 76 through SEQ ID NO: 78. In additional aspects of this embodiment, a Neuro 2A cell line contains an expression construct operably linked to a nucleic acid molecule comprising a modified open reading frame of SEQ ID NO: 76, SEQ ID NO: 77 or SEQ ID NO: 78; a 10T1/2 cell line contains an expression construct operably linked to a nucleic acid molecule comprising a modified open reading frame of SEQ ID NO: 76, SEQ ID NO: 77 or SEQ ID NO: 78; a BALB/3T3 cell line contains an expression construct operably linked to a nucleic acid molecule comprising a modified open reading frame of SEQ ID NO: 76, SEQ ID NO: 77 or SEQ ID NO: 78; a NG108-15 cell line contains an expression construct operably linked to a nucleic acid molecule comprising a modified open reading frame of SEQ ID NO: 76, SEQ ID NO: 77 or SEQ ID NO: 78; or a NIE-115 cell line contains an expression construct operably linked to a nucleic acid molecule comprising a modified open reading frame of SEQ ID NO: 76, SEQ ID NO: 77 or SEQ ID NO: 78.

[0139] In an embodiment, a cell comprises a rat cell comprising an expression construct operably linked to a nucleic acid molecule comprising a modified open reading frame providing increased expression of the encoded active BoNT/A in a rat cell. In an aspect of this embodiment, a cell comprises a rat cell transiently containing an expression construct operably linked to a nucleic acid molecule comprising a modified open reading frame providing increased expression of the encoded active BoNT/A in a rat cell. In another aspect of this embodiment, a cell comprises a rat cell stably containing an expression construct operably linked to a nucleic acid molecule comprising a modified open reading frame providing increased expression of the encoded active BoNT/A in a rat cell. In a further aspect of this embodiment, a rat cell is a rat cell or cell line derived from a rat cell from R. norvegicus. In a further aspect of this embodiment, a rat cell is a rat cell line derived from PC12, GH1, GH3, C6 or L2. In yet another aspect of this embodiment, an expression construct is a rat expression construct. In yet another aspect of this embodiment, a nucleic acid molecule comprises any of the modified open reading frames of SEQ ID NO: 79 through SEQ ID NO: 81. In additional aspects of this embodiment, a PC12 cell line contains an expression construct operably linked to a nucleic acid molecule comprising a modified open reading frame of SEQ ID NO: 79, SEQ ID NO: 80 or SEQ ID NO: 81; a GH1 cell line contains an expression construct operably linked to a nucleic acid molecule comprising a modified open reading frame of SEQ ID NO: 79, SEQ ID NO: 80 or SEQ ID NO: 81; a GH3 cell line contains an expression construct operably linked to a nucleic acid molecule comprising a modified open reading frame of SEQ ID NO: 79, SEQ ID NO: 80 or SEQ ID NO: 81; a C6 cell line contains an expression construct operably linked to a nucleic acid molecule comprising a modified open reading frame of SEQ ID NO: 79, SEQ ID NO: 80 or SEQ ID NO: 81; or a L2 cell line contains an expression construct operably linked to a nucleic acid molecule comprising a modified open reading frame of SEQ ID NO: 79, SEQ ID NO: 80 or SEQ ID NO: 81.

[0140] In an embodiment, a cell comprises a hamster cell comprising an expression construct operably linked to a nucleic acid molecule comprising a modified open reading frame providing increased expression of the encoded active BoNT/A in a hamster cell. In an aspect of this embodiment, a cell comprises a hamster cell transiently containing an expression construct operably linked to a nucleic acid molecule comprising a modified open reading frame providing increased expression of the encoded active BoNT/A in a hamster cell. In another aspect of this embodiment, a cell comprises a hamster cell stably containing an expression construct operably linked to a nucleic acid molecule comprising a modified open reading frame providing increased expression of the encoded active BoNT/A in a hamster cell. In a further aspect of this embodiment, a hamster cell is a hamster cell or cell line derived from a hamster cell from C. griseus. In a further aspect of this embodiment, a hamster cell is a hamster cell line derived from CHO or 6E6. In yet another aspect of this embodiment, an expression construct is a hamster expression construct. In yet another aspect of this embodiment, a nucleic acid molecule comprises any of the modified open reading frames of SEQ ID NO: 82 through SEQ ID NO: 84. In additional aspects of this embodiment, a CHO cell line contains an expression construct operably linked to a nucleic acid molecule comprising a modified open reading frame of SEQ ID NO: 82, SEQ ID NO: 83 or SEQ ID NO: 84; or a 6E6 cell line contains an expression construct operably linked to a nucleic acid molecule comprising a modified open reading frame of SEQ ID NO: 82, SEQ ID NO: 83 or SEQ ID NO: 84.

[0141] In an embodiment, a cell comprises a porcine cell comprising an expression construct operably linked to a nucleic acid molecule comprising a modified open reading frame providing increased expression of the encoded active BoNT/A in a porcine cell. In an aspect of this embodiment, a cell comprises a porcine cell transiently containing an expression construct operably linked to a nucleic acid molecule comprising a modified open reading frame providing increased expression of the encoded active BoNT/A in a porcine cell. In another aspect of this embodiment, a cell comprises a porcine cell stably containing an expression construct operably linked to a nucleic acid molecule comprising a modified open reading frame providing increased expression of the encoded active BoNT/A in a porcine cell. In a further aspect of this embodiment, a porcine cell is a porcine cell or cell line derived from a porcine cell from S. scrofa. In a further aspect of this embodiment, a porcine cell is a porcine cell line derived from PK15, LLC-PK1, ST or ESK-4. In yet another aspect of this embodiment, an expression construct is a porcine expression construct. In yet another aspect of this embodiment, a nucleic acid molecule comprises any of the modified open reading frames of SEQ ID NO: 85 through SEQ ID NO: 87. In additional aspects of this embodiment, a PK15 cell line contains an expression construct operably linked to a nucleic acid molecule comprising a modified open reading frame of SEQ ID NO: 85, SEQ ID NO: 86 or SEQ ID NO: 87; a LLC-PK1 cell line contains an expression construct operably linked to a nucleic acid molecule comprising a modified open reading frame of SEQ ID NO: 85, SEQ ID NO: 86 or SEQ ID NO: 87; a ST cell line contains an expression construct operably linked to a nucleic acid molecule comprising a modified open reading frame of SEQ ID NO: 85, SEQ ID NO: 86 or SEQ ID NO: 87; or a ESK-4 cell line contains an expression construct operably linked to a nucleic acid molecule comprising a modified open reading frame of SEQ ID NO: 85, SEQ ID NO: 86 or SEQ ID NO: 87.

[0142] In an embodiment, a cell comprises a bovine cell comprising an expression construct operably linked to a nucleic acid molecule comprising a modified open reading frame providing increased expression of the encoded active BoNT/A in a bovine cell. In an aspect of this embodiment, a cell comprises a bovine cell transiently containing an expression construct operably linked to a nucleic acid molecule comprising a modified open reading frame providing increased expression of the encoded active BoNT/A in a bovine cell. In another aspect of this embodiment, a cell comprises a bovine cell stably containing an expression construct operably linked to a nucleic acid molecule comprising a modified open reading frame providing increased expression of the encoded active BoNT/A in a bovine cell. In a further aspect of this embodiment, a bovine cell is a bovine cell or cell line derived from a bovine cell from B. taurus. In a further aspect of this embodiment, a bovine cell is a bovine cell line derived from CPAE, BT, SBAC or FB2. In yet another aspect of this embodiment, an expression construct is a bovine expression construct. In yet another aspect of this embodiment, a nucleic acid molecule comprises any of the modified open reading frames of SEQ ID NO: 88 through SEQ ID NO: 90. In additional aspects of this embodiment, a CPAE cell line contains an expression construct operably linked to a nucleic acid molecule comprising a modified open reading frame of SEQ ID NO: 88, SEQ ID NO: 89 or SEQ ID NO: 90; a BT cell line contains an expression construct operably linked to a nucleic acid molecule comprising a modified open reading frame of SEQ ID NO: 88, SEQ ID NO: 89 or SEQ ID NO: 90; a SBAC cell line contains an expression construct operably linked to a nucleic acid molecule comprising a modified open reading frame of SEQ ID NO: 88, SEQ ID NO: 89 or SEQ ID NO: 90; or a FB2 cell line contains an expression construct operably linked to a nucleic acid molecule comprising a modified open reading frame of SEQ ID NO: 88, SEQ ID NO: 89 or SEQ ID NO: 90.

[0143] In an embodiment, a cell comprises an equine cell comprising an expression construct operably linked to a nucleic acid molecule comprising a modified open reading frame providing increased expression of the encoded active BoNT/A in an equine cell. In an aspect of this embodiment, a cell comprises an equine cell transiently containing an expression construct operably linked to a nucleic acid molecule comprising a modified open reading frame providing increased expression of the encoded active BoNT/A in an equine cell. In another aspect of this embodiment, a cell comprises an equine cell stably containing an expression construct operably linked to a nucleic acid molecule comprising a modified open reading frame providing increased expression of the encoded active BoNT/A in an equine cell. In a further aspect of this embodiment, an equine cell is an equine cell or cell line derived from an equine cell from E. caballus. In a further aspect of this embodiment, an equine cell is an equine cell line derived from NBL-6. In yet another aspect of this embodiment, an expression construct is an equine expression construct. In yet another aspect of this embodiment, a nucleic acid molecule comprises any of the modified open reading frames of SEQ ID NO: 91 through SEQ ID NO: 94. In additional aspects of this embodiment, a NBL-6 cell line contains an expression construct operably linked to a nucleic acid molecule comprising a modified open reading frame of SEQ ID NO: 91, SEQ ID NO: 92 or SEQ ID NO: 93.

[0144] In an embodiment, a cell comprises a primate cell comprising an expression construct operably linked to a nucleic acid molecule comprising a modified open reading frame providing increased expression of the encoded active BoNT/A in a primate cell. In an aspect of this embodiment, a cell comprises a primate cell transiently containing an expression construct operably linked to a nucleic acid molecule comprising a modified open reading frame providing increased expression of the encoded active BoNT/A in a primate cell. In another aspect of this embodiment, a cell comprises a primate cell stably containing an expression construct operably linked to a nucleic acid molecule comprising a modified open reading frame providing increased expression of the encoded active BoNT/A in a primate cell. In a further aspect of this embodiment, a primate cell is a primate cell or cell line derived from a primate cell from C. aethiops. In a further aspect of this embodiment, a primate cell is a primate cell line derived from COS-1, COS-7 or VV-1. In yet another aspect of this embodiment, a nucleic acid molecule comprises any of the modified open reading frames of SEQ ID NO: 94 through SEQ ID NO: 96. In additional aspects of this embodiment, a COS-1 cell line contains an expression construct operably linked to a nucleic acid molecule comprising a modified open reading frame of SEQ ID NO: 94, SEQ ID NO: 95 or SEQ ID NO: 96; a COS-7 cell line contains an expression construct operably linked to a nucleic acid molecule comprising a modified open reading frame of SEQ ID NO: 94, SEQ ID NO: 95 or SEQ ID NO: 96; or a VV-1 cell line contains an expression construct operably linked to a nucleic acid molecule comprising a modified open reading frame of SEQ ID NO: 94, SEQ ID NO: 95 or SEQ ID NO: 96.

[0145] In an embodiment, a cell comprises a human cell comprising an expression construct operably linked to a nucleic acid molecule comprising a modified open reading frame providing increased expression of the encoded active BoNT/A in a human cell. In an aspect of this embodiment, a cell comprises a human cell transiently containing an expression construct operably linked to a nucleic acid molecule comprising a modified open reading frame providing increased expression of the encoded active BoNT/A in a human cell. In another aspect of this embodiment, a cell comprises a human cell stably containing an expression construct operably linked to a nucleic acid molecule comprising a modified open reading frame providing increased expression of the encoded active BoNT/A in a human cell. In further aspect of this embodiment, a human cell is a human cell or cell line derived from a human cell from H. sapiens. In a further aspect of this embodiment, a human cell is a human cell line derived from SH-SY5Y, SK-N-DZ, SK-N-F1, SK-N-SH, BE (2)-C, HeLa, HEK 293, MCF-7, HepG2, HL-60, IMR-32, SW-13 or CHP3. In yet another aspect of this embodiment, an expression construct is a human expression construct. In yet another aspect of this embodiment, a nucleic acid molecule comprises any of the modified open reading frames of SEQ ID NO: 97 through SEQ ID NO: 99. In additional aspects of this embodiment, a SH-SY5Y cell line contains an expression construct operably linked to a nucleic acid molecule comprising a modified open reading frame of SEQ ID NO: 97, SEQ ID NO: 98 or SEQ ID NO: 99; a SK-N-DZ cell line contains an expression construct operably linked to a nucleic acid molecule comprising a modified open reading frame of SEQ ID NO: 97, SEQ ID NO: 98 or SEQ ID NO: 99; a SK-N-F1 cell line contains an expression construct operably linked to a nucleic acid molecule comprising a modified open reading frame of SEQ ID NO: 97, SEQ ID NO: 98 or SEQ ID NO: 99; a SK-N-SH cell line contains an expression construct operably linked to a nucleic acid molecule comprising a modified open reading frame of SEQ ID NO: 97, SEQ ID NO: 98 or SEQ ID NO: 99; a BE (2)-C cell line contains an expression construct operably linked to a nucleic acid molecule comprising a modified open reading frame of SEQ ID NO: 97, SEQ ID NO: 98 or SEQ ID NO: 99; a HeLa cell line contains an expression construct operably linked to a nucleic acid molecule comprising a modified open reading frame of SEQ ID NO: 97, SEQ ID NO: 98 or SEQ ID NO: 99; a HEK 293 cell line contains an expression construct operably linked to a nucleic acid molecule comprising a modified open reading frame of SEQ ID NO: 97, SEQ ID NO: 98 or SEQ ID NO: 99; a MCF-7 cell line contains an expression construct operably linked to a nucleic acid molecule comprising a modified open reading frame of SEQ ID NO: 97, SEQ ID NO: 98 or SEQ ID NO: 99; a HepG2 cell line contains an expression construct operably linked to a nucleic acid molecule comprising a modified open reading frame of SEQ ID NO: 97, SEQ ID NO: 98 or SEQ ID NO: 99; a HL-60 cell line contains an expression construct operably linked to a nucleic acid molecule comprising a modified open reading frame of SEQ ID NO: 97, SEQ ID NO: 98 or SEQ ID NO: 99; a IMR-32 cell line contains an expression construct operably linked to a nucleic acid molecule comprising a modified open reading frame of SEQ ID NO: 97, SEQ ID NO: 98 or SEQ ID NO: 99; a SW-13 cell line contains an expression construct operably linked to a nucleic acid molecule comprising a modified open reading frame of SEQ ID NO: 97, SEQ ID NO: 98 or SEQ ID NO: 99; or a CHP3 cell line contains an expression construct operably linked to a nucleic acid molecule comprising a modified open reading frame of SEQ ID NO: 97, SEQ ID NO: 98 or SEQ ID NO: 99.

[0146] Another aspect of the present invention provides a method of producing an active BoNT/A comprising the step of expressing an expression construct comprising a modified open reading frame providing increased expression of an encoded active BoNT/A in a heterologous cell. Another aspect of the present invention provides a method of producing an active BoNT/A comprising the steps of introducing an expression construct comprising a modified open reading frame providing increased expression of an encoded active BoNT/A into a heterologous cell and expressing the expression construct in the heterologous cell.

[0147] The methods disclosed in the present specification include, in part, an active BoNT/A. It is envisioned that any and all active BoNT/A molecules disclosed in the present specification can be produced using the methods disclosed in the present specification. Thus, aspects of this embodiment include producing, without limitation, active BoNT/A, naturally occurring active BoNT/A variants, such as, e.g., BoNT/A isoforms, non-naturally occurring active BoNT/A variants, such as, e.g., conservative BoNT/A variants, non-conservative BoNT/A variants and active BoNT/A fragments thereof, or any combination thereof. Other aspects of this embodiment include, without limitation, active BoNT/A of SEQ ID NO:1, naturally occurring active BoNT/A variants of SEQ ID NO: 1, such as, e.g., active BoNT/A isoforms of SEQ ID NO: 1, non-naturally occurring active BoNT/A variants of SEQ ID NO: 1, such as, e.g., conservative BoNT/A variants of SEQ ID NO: 1, non-conservative BoNT/A variants of SEQ ID NO: 1 and active BoNT/A fragments of SEQ ID NO: 1, or any combination thereof.

[0148] The methods disclosed in the present specification include, in part, an expression construct. It is envisioned that any and all expression constructs disclosed in the present specification can be used. Thus, aspects of this embodiment include, without limitation, cells comprising a viral expression vector operably linked to a modified open reading frame providing increased expression of an encoded active BoNT/A in a mammalian cell; a prokaryotic expression vector operably linked to a modified open reading frame providing increased expression of an encoded active BoNT/A in a prokaryotic cell; cells comprising a yeast expression vector operably linked to a modified open reading frame providing increased expression of an encoded active BoNT/A in a yeast cell; cells comprising a slime mold expression vector operably linked to a modified open reading frame providing increased expression of an encoded active BoNT/A in a slime mold cell; cells comprising a plant expression vector operably linked to a modified open reading frame providing increased expression of an encoded active BoNT/A in a plant cell or cell line derived from a plant cell; cells comprising an insect expression vector operably linked to a modified open reading frame providing increased expression of the encoded active BoNT/A in an insect cell or cell line derived from an insect cell; cells comprising a fish expression vector operably linked to a modified open reading frame providing increased expression of an encoded active BoNT/A in a fish cell or cell line derived from a fish cell; cells comprising an amphibian expression vector operably linked to a modified open reading frame providing increased expression of an encoded active BoNT/A in an amphibian cell or cell line derived from an amphibian cell; cells comprising a bird expression vector operably linked to a modified open reading frame providing increased expression of an encoded active BoNT/A in a bird cell or cell line derived from a bird cell; and cells comprising a mammalian expression vector operably linked to a modified open reading frame providing increased expression of an encoded active BoNT/A in a mammalian cell or cell line derived from a mammalian cell, such as, e.g., mouse, rat, hamster, porcine, bovine, equine, primate and human. Other aspects of this embodiment include, without limitation, expression constructs suitable expressing a BoNT/A disclosed in the present specification using a cell-free extract comprising an expression vector operably linked to a modified open reading frame providing increased expression of an encoded active BoNT/A in the cell-free extract. Other aspects of this embodiment include, without limitation, expression constructs comprising a modified open reading frame that comprises any one of SEQ ID NO: 3 through SEQ ID NO: 99, SEQ ID NO: 110, SEQ ID NO: 112 and SEQ ID NO: 122 through SEQ ID NO: 125.

[0149] The methods disclosed in the present specification include, in part, a heterologous cell. It is envisioned that any and all heterologous cells disclosed in the present specification can be used. Thus, aspects of this embodiment include, without limitation, prokaryotic cells prokaryotic cells including, without limitation, strains of aerobic, microaerophilic, capnophilic, facultative, anaerobic, gram-negative and gram-positive bacterial cells such as those derived from, e.g., Escherichia coli, Bacillus subtilis, Bacillus licheniformis, Bacteroides fragilis, Clostridia perfringens, Clostridia difficile, Caulobacter crescentus, Lactococcus lactis, Methylobacterium extorquens, Neisseria meningirulls, Neisseria meningitidis, Pseudomonas fluorescens and Salmonella typhimurium; and eukaryotic cells including, without limitation, yeast strains, such as, e.g., those derived from Pichia pastoris, Pichia methanolica, Pichia angusta, Schizosaccharomyces pombe, Saccharomyces cerevisiae and Yarrowia lipolytica; slime mold strains, such as, e.g., those derived from, e.g., Dictyostelium discoideum; plant cells and cell lines derived from plant cells, such as, e.g., those derived from species of monocots, species of dicots, Zea mays and Arabidopsis thaliana; insect cells and cell lines derived from insects, such as, e.g., those derived from Spodoptera frugiperda, Trichoplusia ni, Drosophila melanogaster and Manduca sexta; fish cells and cell lines derived from fish cells, such as, e.g., those derived from Denio renia; amphibian cells and cell lines derived from amphibian cells, such as, e.g., those derived from Xenopus laevis and Xenopus tropicalis; bird cells and cell lines derived from bird cells, such as, e.g., those derived from Gallus gallus; mammalian cells and cell lines derived from mammalian cells, such as, e.g., those derived from mouse, rat, hamster, porcine, bovine, equine, primate and human. Cell lines may be obtained from the American Type Culture Collection (2004), at URL address www.atcc.org; European Collection of Cell Cultures (2204), at URL address www.ecacc.org.uk; and the German Collection of Microorganisms and Cell Cultures (2004), at URL address www.dsmz.de. Non-limiting examples of specific protocols for selecting, making and using an appropriate cell line are described in e.g., INSECT CELL CULTURE ENGINEERING (Maftheus F. A. Goosen et al. eds., Marcel Dekker, 1993); INSECT CELL CULTURES: FUNDAMENTAL AND APPLIED ASPECTS (J. M. Vlak et al. eds., Kluwer Academic Publishers, 1996); Maureen A. Harrison & Ian F. Rae, GENERAL TECHNIQUES OF CELL CULTURE (Cambridge University Press, 1997); CELL AND TISSUE CULTURE: LABORATORY PROCEDURES (Alan Doyle et al eds., John Wiley and Sons, 1998); R. Ian Freshney, CULTURE OF ANIMAL CELLS: A MANUAL OF BASIC TECHNIQUE (Wiley-Liss, 4^{th} ed. 2000); ANIMAL CELL CULTURE: A PRACTICAL APPROACH (John R. W. Masters ed., Oxford University Press, 3^{rd} ed. 2000); MOLECULAR CLONING A LABORATORY MANUAL, supra, (2001); BASIC CELL CULTURE: A PRACTICAL APPROACH (John M. Davis, Oxford Press, 2^{nd} ed. 2002); and CURRENT PROTOCOLS IN MOLECULAR BIOLOGY, supra, (2004). These protocols are routine procedures within the scope of one skilled in the art and from the teaching herein.

[0150] The methods disclosed in the present specification include, in part, introducing an expression construct into a heterologous cell. It is envisioned that any and all methods for introducing an expression construct disclosed in the present specification into a cell can be used. A cell disclosed in the present specification can maintain an expression construct transiently or stably. Stably-maintained constructs may be extra-chromosomal and replicate autonomously, or they may be integrated into the chromosomal material of the cell and replicate non-autonomously. Methods useful for introducing a nucleic acid molecule into a cell including, without limitation, calcium phosphate-mediated, DEAE dextran-mediated, lipid-mediated, polybrene-mediated, polylysine-mediated, viral-mediated, microinjection, protoplast fusion, biolistic, and electroporation, see, e.g., Introducing Cloned Genes into Cultured Mammalian Cells, pp. 16.1-16.62 (Sambrook & Russell, eds., Molecular Cloning A Laboratory Manual, Vol. 3, 3^{rd} ed. 2001). One skilled in the art understands that selection of a specific method to introduce an expression construct into a cell will depend, in part, on whether the cell will transiently contain an expression construct or whether the cell will stably contain an expression construct. These protocols are routine procedures within the scope of one skilled in the art and from the teaching herein.

[0151] It is envisioned that both cell-free and cell-based procedures can be used to produce an active BoNT/A using methods disclosed in the present specification. These procedures involve the use of well-characterized vectors, reagents, conditions and cells that are readily available from commercial vendors including, without limitation, BD Biosciences-Clontech, Palo Alto, Calif.; BD Biosciences Pharmingen, San Diego, Calif.; Invitrogen, Inc, Carlsbad, Calif.; QIAGEN, Inc., Valencia, Calif.; Roche Applied Science, Indianapolis, Ind.; and Stratagene, La Jolla, Calif. The selection and use of appropriate procedures to produce an active BoNT/A are described in e.g., PROTEIN EXPRESSION. A PRACTICAL APPROACH, supra, (1999) and Fernandez & Hoeffler, supra, (1999). These protocols are routine procedures within the scope of one skilled in the art and from the teaching herein.

[0152] One procedure of producing active BoNT/A employs a cell-free expression system such as, without limitation, prokaryotic extracts and eukaryotic extracts. Non-limiting examples of prokaryotic cell extracts include the RTS 100 E. coli HY Kit (Roche Applied Science, Indianapolis, Ind.), the ActivePro In Vitro Translation Kit (Ambion, Inc., Austin, Tex.), the EcoPro™ System (EMD Biosciences-Novagen, Madison, Wis.) and the Expressway™ Plus Expression System (Invitrogen, Inc., Carlsbad, Calif.). Eukaryotic cell extract include, without limitation, the RTS 100 Wheat Germ CECF Kit (Roche Applied Science, Indianapolis, Ind.), the TnT® Coupled Wheat Germ Extract Systems (Promega Corp., Madison, Wis.), the Wheat Germ IVT™ Kit (Ambion, Inc., Austin, Tex.), the Retic Lysate IVT™ Kit (Ambion, Inc., Austin, Tex.), the PROTEINscript® II System (Ambion, Inc., Austin, Tex.) and the TnT® Coupled Reticulocyte Lysate Systems (Promega Corp., Madison, Wis.).

[0153] It is also envisioned that any of a variety of cell-based expression procedures are useful for expressing nucleic acid molecules encoding an active BoNT/A disclosed in the present specification. Examples included, without limitation, viral expression systems, prokaryotic expression systems, yeast expression systems, plant expression systems, baculoviral expression systems, insect expression systems and mammalian expression systems. Viral expression systems include, without limitation, the ViraPower™ Lentiviral (Invitrogen, Inc., Carlsbad, Calif.), the Adenoviral Expression Systems (Invitrogen, Inc., Carlsbad, Calif.), the AdEasy™ XL Adenoviral Vector System (Stratagene, La Jolla, Calif.) and the ViraPort® Retroviral Gene Expression System (Stratagene, La Jolla, Calif.). Non-limiting examples of prokaryotic expression systems include the Champion™ pET Expression System (EMD Biosciences-Novagen, Madison, Wis.), the TriEx™ Bacterial Expression Systems (EMD Biosciences-Novagen, Madison, Wis.), the QIAexpress® Expression System (QIAGEN, Inc.), and the Affinity® Protein Expression and Purification System (Stratagene, La Jolla, Calif.). Yeast expression systems include, without limitation, the EasySelect™ Pichia Expression Kit (Invitrogen, Inc., Carlsbad, Calif.), the YES-Echo™ Expression Vector Kits (Invitrogen, Inc., Carlsbad, Calif.) and the SPECTRA™ S. pombe Expression System (Invitrogen, Inc., Carlsbad, Calif.). Non-limiting examples of baculoviral expression systems include the BaculoDirect™ (Invitrogen, Inc., Carlsbad, Calif.), the Bac-to-Bac® (Invitrogen, Inc., Carlsbad, Calif.), and the BD BaculoGold™ (BD Biosciences-Pharmigen, San Diego, Calif.). Insect expression systems include, without limitation, the Drosophila Expression System (DES®) (Invitrogen, Inc., Carlsbad, Calif.), InsectSelect™ System (Invitrogen, Inc., Carlsbad, Calif.) and InsectDirect™ System (EMD Biosciences-Novagen, Madison, Wis.). Non-limiting examples of mammalian expression systems include the T-REx™ (Tetracycline-Regulated Expression) System (Invitrogen, Inc., Carlsbad, Calif.), the Flp-In™ T-REx™ System (Invitrogen, Inc., Carlsbad, Calif.), the pcDNA™ system (Invitrogen, Inc., Carlsbad, Calif.), the pSecTag2 system (Invitrogen, Inc., Carlsbad, Calif.), the Exchanger® System, InterPlay™ Mammalian TAP System (Stratagene, La Jolla, Calif.), Complete Control® Inducible Mammalian Expression System (Stratagene, La Jolla, Calif.) and LacSwitch® II Inducible Mammalian Expression System (Stratagene, La Jolla, Calif.).

### EXAMPLES

[0154] The following non-limiting examples are provided for illustrative purposes only in order to facilitate a more complete understanding of disclosed embodiments and are in no way intended to limit any of the embodiments disclosed in the present specification.

### Example 1

### Selection of Nucleotide Alterations for an Open Reading Frame Providing Increased Expression of the Encoded Active BoNT/A in a Heterologous Cell

1. Manual Selection of Nucleotide Alterations

[0155] To determine codon use of a particular heterologous cell and how it compares to the codon usage found in C. botulinum, codon usage for C. botulinum and selected heterologous cells were tabulated using information obtained from the publicly maintained Codon Usage Database (URL address www.kazusa.or.jp/codon) to facilitate comparisons among organisms (Table 1).

TABLE 1
Codon Usage Frequency

| | | Codon Usage Frequency (%) | | | | | | |
|---|---|---|---|---|---|---|---|---|
| Amino | | Clostridia | Escherichia | Pichia | Yarrowia | Spodoptera | Drosophila | Mus |
| Acid | Codon | botulinum | coli K12 | pastoris | lipolytica | frugiperda | melanogaster | musculus |
| Gly | GGG | 0.10 | 0.15 | 0.10 | 0.05 | 0.05 | 0.07 | 0.23 |
| Gly | GGA | 0.50 | 0.11 | 0.32 | 0.29 | 0.28 | 0.28 | 0.26 |
| Gly | GGT | 0.33 | 0.34 | 0.44 | 0.32 | 0.37 | 0.21 | 0.18 |
| Gly | GGC | 0.07 | 0.40 | 0.14 | 0.34 | 0.31 | 0.43 | 0.33 |
| Glu | GAG | 0.17 | 0.31 | 0.43 | 0.77 | 0.59 | 0.67 | 0.60 |
| Glu | GAA | 0.83 | 0.69 | 0.57 | 0.23 | 0.41 | 0.33 | 0.40 |
| Asp | GAT | 0.90 | 0.63 | 0.58 | 0.34 | 0.37 | 0.53 | 0.44 |
| Asp | GAG | 0.10 | 0.37 | 0.42 | 0.66 | 0.63 | 0.47 | 0.56 |
| Val | GTG | 0.07 | 0.37 | 0.19 | 0.33 | 0.35 | 0.47 | 0.46 |
| Val | GTA | 0.47 | 0.15 | 0.15 | 0.05 | 0.15 | 0.11 | 0.12 |
| Val | GTT | 0.45 | 0.26 | 0.42 | 0.25 | 0.20 | 0.18 | 0.17 |
| Val | GTC | 0.02 | 0.22 | 0.23 | 0.37 | 0.30 | 0.24 | 0.25 |
| Ala | GCG | 0.04 | 0.35 | 0.06 | 0.08 | 0.17 | 0.19 | 0.10 |
| Ala | GCA | 0.46 | 0.21 | 0.24 | 0.11 | 0.15 | 0.17 | 0.23 |
| Ala | GCT | 0.45 | 0.16 | 0.45 | 0.35 | 0.36 | 0.19 | 0.29 |
| Ala | GCC | 0.06 | 0.27 | 0.26 | 0.46 | 0.31 | 0.45 | 0.38 |
| Arg | AGG | 0.12 | 0.02 | 0.15 | 0.04 | 0.21 | 0.11 | 0.22 |
| Arg | AGA | 0.73 | 0.04 | 0.47 | 0.13 | 0.16 | 0.09 | 0.21 |
| Ser | AGT | 0.30 | 0.15 | 0.15 | 0.07 | 0.11 | 0.14 | 0.15 |
| Ser | AGC | 0.06 | 0.28 | 0.09 | 0.11 | 0.17 | 0.25 | 0.24 |
| Lys | AAG | 0.19 | 0.23 | 0.54 | 0.85 | 0.69 | 0.71 | 0.61 |
| Lys | AAA | 0.81 | 0.77 | 0.46 | 0.15 | 0.31 | 0.29 | 0.39 |
| Asn | AAT | 0.90 | 0.45 | 0.47 | 0.17 | 0.29 | 0.44 | 0.43 |
| Asn | AAC | 0.10 | 0.55 | 0.53 | 0.83 | 0.71 | 0.56 | 0.57 |
| Met | ATG | 1.00 | 1.00 | 1.00 | 1.00 | 1.00 | 1.00 | 1.00 |
| Ile | ATA | 0.52 | 0.07 | 0.18 | 0.03 | 0.12 | 0.19 | 0.16 |
| Ile | ATT | 0.43 | 0.51 | 0.50 | 0.44 | 0.29 | 0.34 | 0.34 |
| Ile | ATC | 0.05 | 0.42 | 0.32 | 0.53 | 0.60 | 0.47 | 0.51 |
| Thr | ACG | 0.04 | 0.27 | 0.11 | 0.11 | 0.16 | 0.26 | 0.11 |
| Thr | ACA | 0.44 | 0.13 | 0.24 | 0.13 | 0.21 | 0.19 | 0.29 |
| Thr | ACT | 0.46 | 0.17 | 0.40 | 0.26 | 0.27 | 0.17 | 0.25 |
| Thr | ACC | 0.06 | 0.43 | 0.25 | 0.50 | 0.36 | 0.38 | 0.35 |
| Trp | TGG | 1.00 | 1.00 | 1.00 | 1.00 | 1.00 | 1.00 | 1.00 |
| End | TGA | 0.03 | 0.29 | 0.18 | 0.15 | 0.16 | 0.26 | 0.50 |
| Cys | TGT | 0.80 | 0.45 | 0.66 | 0.45 | 0.35 | 0.29 | 0.48 |
| Cys | TGC | 0.20 | 0.55 | 0.34 | 0.55 | 0.65 | 0.71 | 0.52 |
| End | TAG | 0.23 | 0.07 | 0.28 | 0.39 | 0.16 | 0.33 | 0.23 |
| End | TAA | 0.74 | 0.64 | 0.54 | 0.46 | 0.69 | 0.41 | 0.27 |
| Tyr | TAT | 0.90 | 0.57 | 0.44 | 0.17 | 0.25 | 0.37 | 0.42 |
| Tyr | TAG | 0.10 | 0.43 | 0.56 | 0.83 | 0.75 | 0.63 | 0.58 |
| Leu | TTG | 0.10 | 0.13 | 0.33 | 0.09 | 0.20 | 0.18 | 0.13 |
| Leu | TTA | 0.65 | 0.13 | 0.15 | 0.01 | 0.07 | 0.05 | 0.06 |
| Phe | TTT | 0.88 | 0.57 | 0.54 | 0.37 | 0.24 | 0.37 | 0.43 |
| Phe | TTC | 0.12 | 0.43 | 0.46 | 0.63 | 0.76 | 0.63 | 0.57 |
| Ser | TCG | 0.02 | 0.15 | 0.09 | 0.16 | 0.13 | 0.20 | 0.05 |
| Ser | TCA | 0.28 | 0.12 | 0.19 | 0.08 | 0.15 | 0.09 | 0.14 |
| Ser | TCT | 0.30 | 0.15 | 0.29 | 0.28 | 0.19 | 0.08 | 0.19 |
| Ser | TCC | 0.04 | 0.15 | 0.20 | 0.31 | 0.25 | 0.24 | 0.22 |
| Arg | CGG | 0.01 | 0.10 | 0.05 | 0.11 | 0.05 | 0.15 | 0.19 |
| Arg | CGA | 0.04 | 0.06 | 0.11 | 0.55 | 0.07 | 0.15 | 0.12 |
| Arg | CGT | 0.09 | 0.38 | 0.16 | 0.10 | 0.26 | 0.16 | 0.09 |
| Arg | CGC | 0.01 | 0.40 | 0.05 | 0.07 | 0.24 | 0.33 | 0.18 |
| Gln | CAG | 0.14 | 0.65 | 0.39 | 0.82 | 0.60 | 0.70 | 0.75 |
| Gln | CAA | 0.86 | 0.35 | 0.61 | 0.18 | 0.40 | 0.30 | 0.25 |
| His | CAT | 0.87 | 0.57 | 0.54 | 0.32 | 0.32 | 0.40 | 0.40 |
| His | CAC | 0.13 | 0.43 | 0.46 | 0.68 | 0.68 | 0.60 | 0.60 |
| Leu | CTG | 0.01 | 0.50 | 0.16 | 0.38 | 0.31 | 0.43 | 0.40 |
| Leu | CTA | 0.10 | 0.04 | 0.11 | 0.05 | 0.07 | 0.09 | 0.08 |
| Leu | CTT | 0.13 | 0.10 | 0.16 | 0.18 | 0.13 | 0.10 | 0.13 |
| Leu | CTC | 0.01 | 0.10 | 0.08 | 0.29 | 0.22 | 0.15 | 0.20 |
| Pro | CCG | 0.03 | 0.52 | 0.09 | 0.09 | 0.16 | 0.29 | 0.10 |
| Pro | CCA | 0.44 | 0.19 | 0.40 | 0.10 | 0.23 | 0.25 | 0.28 |
| Pro | CCT | 0.46 | 0.16 | 0.35 | 0.32 | 0.30 | 0.13 | 0.30 |
| Pro | CCC | 0.07 | 0.13 | 0.15 | 0.49 | 0.31 | 0.33 | 0.31 |

| Amino | | Rattus | Cricetulus | Sus | Bos | Equus | Cercopithecus | Homo |
|---|---|---|---|---|---|---|---|---|
| Acid | Codon | norvegicus | griseus | scrofa | taurus | caballus | aethiops | sapiens |
| Gly | GGG | 0.24 | 0.21 | 0.26 | 0.25 | 0.24 | 0.26 | 0.25 |
| Gly | GGA | 0.25 | 0.25 | 0.23 | 0.24 | 0.23 | 0.24 | 0.25 |
| Gly | GGT | 0.17 | 0.20 | 0.14 | 0.16 | 0.17 | 0.15 | 0.16 |
| Gly | GGC | 0.34 | 0.34 | 0.37 | 0.35 | 0.37 | 0.35 | 0.34 |
| Glu | GAG | 0.61 | 0.60 | 0.64 | 0.60 | 0.64 | 0.62 | 0.58 |
| Glu | GAA | 0.39 | 0.40 | 0.36 | 0.40 | 0.36 | 0.38 | 0.42 |
| Asp | GAT | 0.42 | 0.47 | 0.39 | 0.42 | 0.41 | 0.42 | 0.46 |
| Asp | GAG | 0.58 | 0.53 | 0.61 | 0.58 | 0.59 | 0.58 | 0.54 |
| Val | GTG | 0.48 | 0.46 | 0.51 | 0.49 | 0.50 | 0.46 | 0.47 |
| Val | GTA | 0.11 | 0.12 | 0.08 | 0.10 | 0.08 | 0.08 | 0.12 |
| Val | GTT | 0.16 | 0.18 | 0.14 | 0.16 | 0.14 | 0.17 | 0.18 |
| Val | GTC | 0.26 | 0.24 | 0.27 | 0.26 | 0.28 | 0.29 | 0.24 |
| Ala | GCG | 0.10 | 0.07 | 0.12 | 0.11 | 0.12 | 0.10 | 0.11 |
| Ala | GCA | 0.22 | 0.24 | 0.18 | 0.20 | 0.18 | 0.19 | 0.23 |
| Ala | GCT | 0.28 | 0.33 | 0.24 | 0.26 | 0.25 | 0.26 | 0.26 |
| Ala | GCC | 0.40 | 0.37 | 0.46 | 0.43 | 0.44 | 0.45 | 0.40 |
| Arg | AGG | 0.21 | 0.19 | 0.20 | 0.21 | 0.22 | 0.20 | 0.21 |
| Arg | AGA | 0.19 | 0.19 | 0.19 | 0.20 | 0.20 | 0.16 | 0.21 |
| Ser | AGT | 0.15 | 0.16 | 0.12 | 0.14 | 0.13 | 0.14 | 0.15 |
| Ser | AGC | 0.25 | 0.22 | 0.27 | 0.25 | 0.26 | 0.26 | 0.24 |
| Lys | AAG | 0.63 | 0.61 | 0.63 | 0.61 | 0.63 | 0.61 | 0.57 |
| Lys | AAA | 0.37 | 0.39 | 0.37 | 0.39 | 0.37 | 0.39 | 0.43 |
| Asn | AAT | 0.40 | 0.45 | 0.39 | 0.40 | 0.39 | 0.41 | 0.47 |
| Asn | AAC | 0.60 | 0.55 | 0.61 | 0.60 | 0.61 | 0.59 | 0.53 |
| Met | ATG | 1.00 | 1.00 | 1.00 | 1.00 | 1.00 | 1.00 | 1.00 |
| Ile | ATA | 0.14 | 0.14 | 0.13 | 0.14 | 0.13 | 0.12 | 0.16 |
| Ile | ATT | 0.32 | 0.35 | 0.29 | 0.33 | 0.29 | 0.30 | 0.36 |
| Ile | ATC | 0.54 | 0.51 | 0.57 | 0.53 | 0.58 | 0.58 | 0.48 |
| Thr | ACG | 0.12 | 0.08 | 0.15 | 0.13 | 0.13 | 0.18 | 0.12 |
| Thr | ACA | 0.28 | 0.29 | 0.22 | 0.25 | 0.22 | 0.27 | 0.28 |
| Thr | ACT | 0.23 | 0.26 | 0.20 | 0.22 | 0.22 | 0.22 | 0.24 |
| Thr | ACC | 0.37 | 0.37 | 0.43 | 0.39 | 0.43 | 0.34 | 0.36 |
| Trp | TGG | 1.00 | 1.00 | 1.00 | 1.00 | 1.00 | 1.00 | 1.00 |
| End | TGA | 0.49 | 0.49 | 0.55 | 0.49 | 0.42 | 0.48 | 0.49 |
| Cys | TGT | 0.44 | 0.47 | 0.39 | 0.42 | 0.43 | 0.39 | 0.45 |
| Cys | TGC | 0.56 | 0.53 | 0.61 | 0.58 | 0.57 | 0.61 | 0.55 |
| End | TAG | 0.23 | 0.26 | 0.19 | 0.23 | 0.23 | 0.32 | 0.23 |
| End | TAA | 0.28 | 0.25 | 0.25 | 0.29 | 0.35 | 0.20 | 0.28 |
| Tyr | TAT | 0.40 | 0.44 | 0.36 | 0.39 | 0.35 | 0.41 | 0.44 |
| Tyr | TAG | 0.60 | 0.56 | 0.64 | 0.61 | 0.65 | 0.59 | 0.56 |
| Leu | TTG | 0.12 | 0.15 | 0.11 | 0.12 | 0.11 | 0.12 | 0.13 |
| Leu | TTA | 0.06 | 0.06 | 0.05 | 0.06 | 0.05 | 0.06 | 0.07 |
| Phe | TTT | 0.41 | 0.47 | 0.38 | 0.41 | 0.39 | 0.40 | 0.46 |
| Phe | TTC | 0.59 | 0.53 | 0.62 | 0.59 | 0.61 | 0.60 | 0.54 |
| Ser | TCG | 0.06 | 0.05 | 0.06 | 0.06 | 0.06 | 0.05 | 0.06 |
| Ser | TCA | 0.14 | 0.14 | 0.12 | 0.13 | 0.12 | 0.13 | 0.15 |
| Ser | TCT | 0.19 | 0.22 | 0.17 | 0.18 | 0.18 | 0.19 | 0.19 |
| Ser | TCC | 0.23 | 0.22 | 0.26 | 0.23 | 0.25 | 0.23 | 0.22 |
| Arg | CGG | 0.20 | 0.20 | 0.21 | 0.20 | 0.18 | 0.22 | 0.21 |
| Arg | CGA | 0.12 | 0.14 | 0.10 | 0.11 | 0.10 | 0.11 | 0.11 |
| Arg | CGT | 0.09 | 0.11 | 0.07 | 0.08 | 0.10 | 0.08 | 0.08 |
| Arg | CGC | 0.19 | 0.17 | 0.22 | 0.20 | 0.20 | 0.22 | 0.19 |
| Gln | CAG | 0.76 | 0.77 | 0.78 | 0.76 | 0.76 | 0.73 | 0.74 |
| Gln | CAA | 0.24 | 0.23 | 0.22 | 0.24 | 0.24 | 0.27 | 0.26 |
| His | CAT | 0.38 | 0.44 | 0.35 | 0.36 | 0.38 | 0.36 | 0.42 |
| His | CAC | 0.62 | 0.56 | 0.65 | 0.64 | 0.62 | 0.64 | 0.58 |
| Leu | CTG | 0.42 | 0.40 | 0.45 | 0.43 | 0.46 | 0.41 | 0.40 |
| Leu | CTA | 0.07 | 0.08 | 0.05 | 0.06 | 0.06 | 0.06 | 0.07 |
| Leu | CTT | 0.12 | 0.13 | 0.11 | 0.12 | 0.11 | 0.15 | 0.13 |
| Leu | CTC | 0.21 | 0.19 | 0.23 | 0.21 | 0.22 | 0.20 | 0.20 |
| Pro | CCG | 0.11 | 0.08 | 0.14 | 0.13 | 0.11 | 0.11 | 0.11 |
| Pro | CCA | 0.27 | 0.28 | 0.24 | 0.25 | 0.23 | 0.33 | 0.27 |
| Pro | CCT | 0.30 | 0.32 | 0.26 | 0.27 | 0.30 | 0.24 | 0.28 |
| Pro | CCC | 0.32 | 0.32 | 0.37 | 0.35 | 0.35 | 0.33 | 0.33 |

[0156] To determine G+C content of a particular heterologous cell and how it compares to the codon usage found in C. botulinum, G+C content for C. botulinum and selected heterologous cells were tabulated using information obtained from the publicly maintained Codon Usage Database (URL address www.kazusa.or.jp/codon) to facilitate comparisons among organisms (Table 2).

TABLE 2
G + C content

| | Total | First Codon | Second Codon | Third Codon |
|---|---|---|---|---|
| | G + C | Position | Position | Position |
| | Content | G + C | G + C | G + C |
| Organism | (%) | Content (%) | Content (%) | Content (%) |
| Clostridium | 25.29 | 33.44 | 28.38 | 14.04 |
| botulinum | | | | |
| Escherichia coli | 51.80 | 58.89 | 40.72 | 55.79 |
| Pichia pastoris | 42.99 | 49.16 | 37.49 | 42.32 |
| Yarrowia | 54.69 | 58.17 | 41.18 | 64.71 |
| lipolytica | | | | |
| Zea mays | 54.60 | 57.46 | 43.03 | 63.31 |
| Spodoptera | 51.44 | 53.92 | 39.52 | 60.88 |
| frugiperda | | | | |
| Drosophila | 53.99 | 55.90 | 41.51 | 64.57 |
| melanogaster | | | | |
| Mus musculus | 52.33 | 55.57 | 42.19 | 59.24 |
| Rattus norvegicus | 52.82 | 55.64 | 41.64 | 61.19 |
| Cricetulus | 51.26 | 55.29 | 40.43 | 58.07 |
| griseus | | | | |
| Sus scrofa | 54.68 | 56.47 | 41.95 | 65.63 |
| Bos taurus | 53.14 | 55.43 | 41.46 | 62.53 |
| Equus caballus | 53.63 | 55.96 | 40.71 | 64.21 |
| Cercopithecus | 52.81 | 53.80 | 42.36 | 62.26 |
| aethiops | | | | |
| Homo sapiens | 52.54 | 56.10 | 42.55 | 58.99 |

[0157] Using Tables 1 and 2, one skilled in the art can manually select which nucleotides to alter to the open reading frame of SEQ ID NO: 2 so that the open reading frame now provides synonymous codons preferred by the heterologous cell selected to express this open reading frame and increase the G+C content to better match the G+C content of this heterologous cell.

2. Computer-Assisted Selection of Nucleotide Alterations

[0158] To alter the open reading frame of SEQ ID NO: 2 in order to provide increased expression of the encoded BoNT/A in a heterologous cell, synonymous codon usage for each organism was determined using the publicly available Backtranslate Tool, version 2 (Entelechon, GmbH, Regensburg, Germany, at URL address entelechon.com/eng/backtranslation). The active BoNT/A amino acid sequence of SEQ ID NO: 1 was submitted to this web-based program and prospective modified open reading frames were generated. These modified sequences were subsequently analyzed for G+C content, and substitutions that better matched the G+C content of a specific heterologous cell were made. This procedure resulted in the modified open reading frames SEQ ID NO: 4 through SEQ ID NO: 99, each encoding an active BoNT/A of SEQ ID NO: 1, but optimized to be expressed in a heterologous cell. Nucleic acid molecule sequences SEQ ID NO: 4, 7, 10, 13, 16, 19, 22, 25, 28, 31, 34, 37, 40, 43, 46, 49, 52, 55, 58, 61, 64, 67, 70, 73, 76, 79, 82, 85, 88, 91, 94 and 97 were generated using codon tables for the indicated species where the codon usage frequencies for each amino acid were maintained when generating the nucleic acid molecule. For example, when generating the nucleic acid molecule SEQ ID NO: 4 for expression in E. coli, the codon usage frequencies selected for Arginine were 10% for CGG, 6% for CGA, 38% for CGT, 40% for CGC, 2% for AGG and 4% for AGA; the codon usage frequencies for Alanine were 35% for GCG, 21 % for GCA, 16% for GCT and 27% for GCC; and the codon usage frequencies for Cysteine were 45% for TGT and 55% for TGC.

[0159] Nucleic acid molecule sequences SEQ ID NO: 5, 8, 11, 14, 17, 20, 23, 26, 29, 32, 35, 38, 41, 44, 47, 50, 53, 56, 59, 62, 65, 68, 71, 74, 77, 80, 83, 86, 89, 92, 95 and 98 were generated using codon tables for the indicated species where only the most frequently used codon for each amino acid was selected to generate a nucleic acid molecule. For example, when generating the nucleic acid molecule SEQ ID NO: 5 for expression in E. coli, the codon CGC was used for Arginine; the codon GCG was used for Alanine; and the codon TGC was used for Cysteine.

[0160] Nucleic acid molecule sequences SEQ ID NO: 6, 9, 12, 15, 18, 21, 24, 27, 30, 33, 36, 39, 42, 45, 48, 51, 54, 57, 60, 63, 66, 69, 72, 75, 78, 81, 84, 87, 90, 93, 96 and 99 were generated using codon tables for the indicated species where codons below a 50% theoretical ratio for each amino acid were discarded when generating the nucleic acid molecule. Arginine has a theoretical ratio of 16.7% because this amino acid is coded by six different codons, Alanine has a theoretical ratio of 25% because this amino acid is coded by four different codons and Cysteine has a theoretical ratio of 50% because this amino acid is coded by two different codons. Discarding codons below a 50% theoretical ratio would mean that all codons below a 8.35% usage frequency will be discarded for Arginine; all codons below a 12.5% usage frequency will be discarded for Alanine; and all codons below a 25% usage frequency will be discarded for Cysteine. For example, when generating the nucleic acid molecule SEQ ID NO: 6 for expression in E. coli, the codons CGG, CGT and CGC were used for Arginine; the codons GCG, GCA, GCT and GCC were used for Alanine; and the codons TGT and TGC were used for Cysteine.

### Example 2

### Synthesis of a Nucleic Acid Molecule

[0161] A nucleic acid molecule encoding a BoNT/A was modified so that particular synonymous codons preferred by E. coli were incorporated and the G+C content was increased from about 25% to approximately 40%. Initially, an algorithm generated a modified open reading frame encoding the BoNT/A of SEQ ID NO: 1 (BlueHeron® Biotechnology, Bothell Wash.). This program 1) reduced the mRNA secondary structure (based on a free energy calculation) of the nucleic acid molecule and 2) altered the synonymous codon usage of the open reading frame of the nucleic acid molecule to an overall codon usage preferred by E. coli. The algorithm uses a statistical model to search for improved solutions (i.e., combinations of representative codon usage and lower free energy) through an iterative process. This sequence was then modified by one skilled in the art at Allergan, Inc. to add unique restriction endonuclease sites at the 5′-termini (e.g., EcoRV, BamHI, EcoRI, SacI and NdeI) and 3′-termini (e.g., SalI, HindIII, NotI, EagI, XhoI and AvaI) of the nucleic acid molecule in order to facilitate cloning into expression vectors, reduce polymononucleotide regions and remove internal regulatory or structural site sequences.

[0162] Based on this sequence information above, BlueHeron® Biotechnology synthesized a nucleic acid molecule of SEQ ID NO: 3. Oligonucleotides of 20 to 50 bases in length were synthesized using standard phosphoramidite synthesis. These oligonucleotides were hybridized into double stranded duplexes that were ligated together to assemble the full-length nucleic acid molecule. This nucleic acid molecule was cloned using standard molecular biology methods into a pUCBHB1 vector at the SmaI site to generate pUCBHB1-BoNT/A. The synthesized nucleic acid molecule was verified by sequencing using Big Dye Terminator™ Chemistry 3.1 (Applied Biosystems, Foster City, Calif.) and an ABI 3100 sequencer (Applied Biosystems, Foster City, Calif.).

### Example 3

### Construction of pUCBHB1/iBoNT/A (H227Y)

[0163] Because of regulatory and safety considerations, initial expression of a construct comprising a modified open reading frame encoding BoNT/A was performed using enzymatically inactive BoNT/A (iBoNT/A). These initial expression attempts allowed development of the protocols and strategies necessary for expressing the constructs encoding an active BoNT/A. Several iBoNT/A molecules were designed based on the knowledge that mutation of the zinc binding motif within the LC disrupts enzymatic activity. In the first, Histidine-227 in BoNT/A was substituted with tyrosine (H227Y). A second point mutation, one in which glutamine replaces Glutamate-224 (E224Q), was also constructed. Unlike the H227Y mutant, in which a zinc binding residue is mutated, the E224Q mutation replaces the residue responsible for coordinating and activating the nucleophilic water molecule that adds to the scissile peptide bond. Both of these inactivating mutations are within the highly conserved zinc binding motif (Table 3).

TABLE 3
Zinc-binding motif inactivating mutations

| Consensus motif: | HExxH |
|---|---|
| Native BoNT/A | HELIH |
| iBoNT/A(H227Y) | HELIY |
| iBoNT/A(E224Q) | HQLIH |

[0164] The pUCBHB1/BoNT/A of Example 3 was used as the starting construct for site-directed in vitro mutagenesis experiments that resulted in the construction of the constructs pUCBHB1/iBoNT/A (H227Y). To construct pUCBHB1/iBoNT/A (H227Y), a 50 μL reaction was assembled using the pUCBHB1-BoNT/A construct as a template, the following H227Y Primer Pair, sense oligonucleotide, 5′-GTGACCTTGGCACA TGAACTTATTTATGCCGGGCATCGCTTGTATGGAATCGCC-3′ (SEQ ID NO: 100) and antisense oligonucleotide, 5′-GGCGATTCCATACAAGCGATGCCCGGCATAAATAAGTTCATGTGCCAAGGTCAC-3′ (SEQ ID NO: 101); and reagents included with the QuickChange® II XL Site-Directed Mutagenesis kit (Stratagene, La Jolla, Calif.). The polymerase chain reaction (PCR) mix contained 5 μL of 10× Buffer, 1 μL of deoxyribonucleotides (dNTPs), 1 μL of PfuUltra™ High Fidelity DNA polymerase (2.5 units/μL), 125 ng of each primer, 100 ng of template DNA, and nuclease-free water to a final volume of 50 μL. The thermocycler conditions were: one cycle of 95° C. for 60 seconds; 16 cycles of 95° C. for 30 seconds, 55° C. for 60 seconds, and 72° C. for 10 minutes; one cycle of 72° C. for 5 minutes; and 4° C. to hold. Following thermocycling, 1 μL of DpnI restriction enzyme (Stratagene, La Jolla, Calif.) was added to the reaction and incubated for 1 hour at 37° C. to digest the template DNA. The reaction was purified by QIAquick kit (QIAGEN, Inc., Valencia, Calif.) and analysis by agarose gel electrophoresis showed that the reaction produced full-length plasmid. The mutagenesis products were transformed into chemically competent E. coli DH5α cells (Invitrogen, Inc, Carlsbad, Calif.) using a heat shock method, plated on 1.5% Luria-Bertani agar plates (pH 7.0) containing 100 μg/mL of Ampicillin, and placed in a 37° C. incubator for overnight growth. Candidate mutagenesis constructs were isolated as Ampicillin resistant colonies and analyzed using an alkaline lysis plasmid mini-preparation procedure to isolate the expression construct and restriction endonuclease digests to determine the presence of the insert. The incorporation of the point mutation was determined by sequence analysis of candidate plasmid constructs. The nucleic acid molecule of SEQ ID NO: 116 encodes iBoNT/A (H227Y) of SEQ ID NO: 117.

### Example 4

### Construction of pRSETb/His-iBoNT/A (H227Y)

[0165] To construct pRSETb/His-iBoNT/A (H227Y), a pUCBHB1/iBoNT/A (H227Y) construct was digested with BamHI and HindIII to excise the fragment encoding iBoNT/A (H227Y) insert. The resulting restriction fragment was purified by the QIAquick Gel Extraction Kit (QIAGEN, Inc., Valencia, Calif.), and the fragment containing the entire open reading frame was subcloned into the pRSETb vector (Invitrogen, Inc, Carlsbad, Calif.) that had been digested with restriction endonucleases BamHI and HindIII. The fragment and vector were ligated overnight with T4 DNA ligase at 16° C. to yield pRSETb/His-iBoNT/A (H227Y). An aliquot of the ligation mixture was transformed by a standard heat-shock protocol into chemically competent TOP10 cells (Invitrogen, Inc, Carlsbad, Calif.), plated onto 1.5% Luria-Bertani agar plates (pH 7.0) containing 100 μg/mL of Ampicillin, and placed in a 37° C. incubator for overnight growth. Candidate expression constructs were selected as Ampicillin-resistant colonies. Resistant colonies were used to inoculate 2 mL of Luria-Bertani media containing 100 μg/mL of Ampicillin that were then grown in a 37° C. incubator, shaking at 250 rpm, overnight. The bacteria cells were harvested by microcentrifugation and the plasmid DNA was isolated using QIAGEN miniprep kits (QIAGEN, Inc., Valencia, Calif.). Candidate expression constructs were screened by restriction digestion with BamHI and PstI to determine the presence and orientation of the correct insert fragment. Cultures containing the desired expression construct were used to inoculate 1 L baffled flasks containing 200 mL of Luria-Bertani media containing 100 μg/mL of Ampicillin and placed in a 37° C. incubator, shaking at 250 rpm, for overnight growth. Purified plasmid DNA corresponding to an expression construct was isolated using the QIAGEN Maxi-prep method (QIAGEN, Inc., Valencia, Calif.) and sequenced to verify that the correct expression construct was made. This cloning strategy yielded a pRSETb expression construct comprising the nucleic acid molecule of SEQ ID NO: 118 encoding a iBoNT/A (H227Y) operably-linked to an amino-terminal enterokinase cleavable polyhistidine affinity binding peptide of SEQ ID NO: 119.

### Example 5

### Expression of pRSETb/His-iBoNT/A (H227Y)

[0166] The following example illustrates a procedure useful for expressing a BoNT/A from an expression construct disclosed in the present specification. A pRSETb/His-iBoNT/A (H227Y) expression construct was introduced into chemically competent E. coli BL21 (DE3) cells (Invitrogen, Inc, Carlsbad, Calif.) using a heat-shock transformation protocol. The heat-shock reaction was plated onto 1.5% Luria-Bertani agar plates (pH 7.0) containing 100 μg/mL of Ampicillin and placed in a 37° C. incubator for overnight growth. Ampicillin-resistant colonies of transformed E. coli containing pRSETb/His-iBoNT/A (H227Y) were used to inoculate a baffled flask containing 3.0 mL of PA-0.5G media containing 100 μg/mL of Ampicillin which was then placed in a 37° C. incubator, shaking at 250 rpm, for overnight growth. The resulting overnight starter culture was in turn used to inoculate a 3 L baffled flask containing ZYP-5052 autoinducing media containing 100 μg/mL of Ampicillin at a dilution of 1:1000. Culture volumes ranged from about 600 mL (20% flask volume) to about 750 mL (25% flask volume). These cultures were grown in a 37° C. incubator shaking at 250 rpm for approximately 5.5 hours and were then transferred to a 16° C. incubator shaking at 250 rpm for overnight expression. Cells were harvested by centrifugation (4,000 rpm at 4° C. for 20-30 minutes) and used immediately, or stored dry at −80° C. until needed.

### Example 6

### Purification and Quantification of His-iBoNT/A (H227Y)

[0167] The following example illustrates methods useful for purification and quantification of BoNT/A disclosed in the present specification. For immobilized metal affinity chromatography (IMAC) protein purification, E. coli BL21 (DE3) cell pellets used to express His-iBoNT/A (H227Y), as described in Example 5, were resuspended in Column Binding Buffer (25 mM N-(2-hydroxyethyl)piperazine-N′(2-ethanesulfonic acid) (HEPES), pH 7.8; 500 mM sodium chloride; 10 mM imidazole; 2× Protease Inhibitor Cocktail Set III (EMD Biosciences-Calbiochem, San Diego Calif.); 5 units/mL of Benzonase (EMD Biosciences-Novagen, Madison, Wis.); 0.1% (v/v) Triton-X® 100, 4-octylphenol polyethoxylate; 10% (v/v) glycerol), and then transferred to a cold Oakridge centrifuge tube. The cell suspension was sonicated on ice (10-12 pulses of 10 seconds at 40% amplitude with 60 seconds cooling intervals on a Branson Digital Sonifier) in order to lyse the cells and release the His-iBoNT/A, and then centrifuged (16,000 rpm at 4° C. for 20 minutes) to clarify the lysate. An immobilized metal affinity chromatography column was prepared using a 20 mL Econo-Pac column support (Bio-Rad Laboratories, Hercules, Calif.) packed with 2.5-5.0 mL of TALON™ SuperFlow Co²⁺ affinity resin (BD Biosciences-Clontech, Palo Alto, Calif.), which was then equilibrated by rinsing with 5 column volumes of deionized, distilled water, followed by 5 column volumes of Column Binding Buffer. The clarified lysate was applied slowly to the equilibrated column by gravity flow (approximately 0.25-0.3 mL/minute). The column was then washed with 5 column volumes of Column Wash Buffer (N-(2-hydroxyethyl)piperazine-N′-(2-ethanesulfonic acid) (HEPES), pH 7.8; 500 mM sodium chloride; 10 mM imidazole; 0.1% (v/v) Triton-X® 100, 4-octylphenol polyethoxylate; 10% (v/v) glycerol). His-iBoNT/A was eluted with 20-30 mL of Column Elution Buffer (25 mM N-(2-hydroxyethyl)piperazine-N′-(2-ethanesulfonic acid) (HEPES), pH 7.8; 500 mM sodium chloride; 500 mM imidazole; 0.1% (v/v) Triton-X® 100, 4-octylphenol polyethoxylate; 10% (v/v) glycerol) and collected in approximately twelve 1 mL fractions. The amount of His-iBoNT/A (H227Y) contained in each elution fraction was determined by a Bradford dye assay. In this procedure, 20 μL aliquots of each 1.0 mL fraction was combined with 200 μL of Bio-Rad Protein Reagent (Bio-Rad Laboratories, Hercules, Calif.), diluted 1 to 4 with deionized, distilled water, and then the intensity of the colorimetric signal was measured using a spectrophotometer. The five fractions with the strongest signal were considered the elution peak and pooled. Total protein yield was determined by estimating the total protein concentration of the pooled peak elution fractions using bovine gamma globulin as a standard (Bio-Rad Laboratories, Hercules, Calif.).

[0168] For purification of a BoNT/A using a FPLC desalting column, a HiPrep™ 26/10 size exclusion column (Amersham Biosciences, Piscataway, N.J.) was pre-equilibrated with 80 mL of 4° C. Column Buffer (50 mM sodium phosphate, pH 6.5). After the column was equilibrated, a His-iBoNT/A (H227Y) sample was applied to the size exclusion column with an isocratic mobile phase of 4° C. Column Buffer and at a flow rate of 10 mL/minute using a BioLogic DuoFlow chromatography system (Bio-Rad Laboratories, Hercules, Calif.). The desalted His-iBoNT/A (H227Y) sample was collected as a single fraction of approximately 7-12 mL.

[0169] For purification of a BoNT/A using a FPLC ion exchange column, a His-iBoNT/A (H227Y) sample that had been desalted following elution from an IMAC column was applied to a 1 mL UNO-S1™ cation exchange column (Bio-Rad Laboratories, Hercules, Calif.) using a BioLogic DuoFlow chromatography system (Bio-Rad Laboratories, Hercules, Calif.). The sample was applied to the column in 4° C. Column Buffer (50 mM sodium phosphate, pH 6.5) and eluted by linear gradient with 4° C. Elution Buffer (50 mM sodium phosphate, 1 M sodium chloride, pH 6.5) as follows: step 1, 5.0 mL of 5% Elution Buffer at a flow rate of 1 mL/minute; step 2, 20.0 mL of 5-30% Elution Buffer at a flow rate of 1 muminute; step 3, 2.0 mL of 50% Elution Buffer at a flow rate of 1.0 mL/minute; step 4, 4.0 mL of 100% Elution Buffer at a flow rate of 1.0 mL/minute; and step 5, 5.0 mL of 0% Elution Buffer at a flow rate of 1.0 mL/minute. Elution of peptides from the column was monitored at 280, 260, and 214 nm, and peaks absorbing above a minimum threshold (0.01 au) at 280 nm were collected. Most of the His-iBoNT/A eluted at a sodium chloride concentration of approximately 100 to 200 mM. Average total yields of His-iBoNT/A (H227Y) were approximately 1-2 mg/L as determined by a Bradford assay.

[0170] Expression of the His-iBoNT/A (H227Y) was analyzed by polyacrylamide gel electrophoresis. Samples purified using the procedure described above were added to 2× LDS Sample Buffer (Invitrogen, Inc, Carlsbad, Calif.) and peptides separated by MOPS polyacrylamide gel electrophoresis using NuPAGE® Novex 4-12% Bis-Tris precast polyacrylamide gels (Invitrogen, Inc, Carlsbad, Calif.) under denaturing, reducing conditions. Gels were stained with SYPRO® Ruby (Bio-Rad Laboratories, Hercules, Calif.) and the separated peptides imaged using a Fluor-S MAX Multilmager (Bio-Rad Laboratories, Hercules, Calif.) for quantification of peptide expression levels. The size and amount of the His-iBoNT/A (H227Y) was determined by comparison to MagicMark™ protein molecular weight standards (Invitrogen, Inc, Carlsbad, Calif.). The gels revealed what appeared to be a full-length His-iBoNT/A (H227Y).

[0171] Expression of the His-iBoNT/A (H227Y) was also analyzed by Western blot analysis. Protein samples purified using the procedure described above were added to 2× LDS Sample Buffer (Invitrogen, Inc, Carlsbad, Calif.) and separated by MOPS polyacrylamide gel electrophoresis using NuPAGE® Novex 4-12% Bis-Tris precast polyacrylamide gels (Invitrogen, Inc, Carlsbad, Calif.) under denaturing, reducing conditions. Separated peptides were transferred from the gel onto polyvinylidene fluoride (PVDF) membranes (Invitrogen, Inc, Carlsbad, Calif.) by Western blotting using a Trans-Blot® SD semi-dry electrophoretic transfer cell apparatus (Bio-Rad Laboratories, Hercules, Calif.). PVDF membranes were blocked by incubating at room temperature for 2 hours in a solution containing 25 mM Tris-Buffered Saline (25 mM 2-amino-2-hydroxymethyl-1,3-propanediol hydrochloric acid (Tris-HCl)(pH 7.4), 137 mM sodium chloride, 2.7 mM potassium chloride), 0.1% TWEEN-20®, polyoxyethylene (20) sorbitan monolaureate, 2% bovine serum albumin, 5% nonfat dry milk. Blocked membranes were incubated at 4° C. for overnight in Tris-Buffered Saline TWEEN-20® (25 mM Tris-Buffered Saline, 0.1% TWEEN-20®, polyoxyethylene (20) sorbitan monolaureate) containing one of the following primary antibodies as a probe: a 1:5,000 dilution of rabbit polyclonal anti-BoNT/A antiserum (Allergan, Inc.); or a 1:10,000 dilution of rabbit polyclonal anti-polyhistidine antiserum (Abcam Inc., Cambridge, Mass.). Primary antibody probed blots were washed three times for 15 minutes each time in Tris-Buffered Saline TWEEN-20®. Washed membranes were incubated at room temperature for 2 hours in Tris-Buffered Saline TWEEN-20® containing a 1:20,000 dilution of goat polyclonal anti-rabbit immunoglobulin G, heavy and light chains (IgG, H+L) antibody conjugated to horseradish peroxidase (HRP; Pierce Biotechnology, Inc., Rockford, Ill.) as a secondary antibody. Secondary antibody-probed blots were washed three times for 15 minutes each time in Tris-Buffered Saline TWEEN-20®. Signal detection of the labeled His-iBoNT/A (H227Y) was visualized using the ECL Plus™ Western Blot Detection System (Amersham Biosciences, Piscataway, N.J.) and imaged with a Typhoon 9410 Variable Mode Imager (Amersham Biosciences, Piscataway, N.J.) for quantification of His-iBoNT/A (H227Y) expression levels.

### Example 7

### Construction of pET30b/His-iBoNT/A (H227Y)

[0172] To construct pET30b/His-iBoNT/A (H227Y), a pRSETb/iBoNT/A (H227Y) construct was digested with BamHI and HindIII to excise the fragment encoding iBoNT/A (H227Y). The resulting restriction fragment was purified by the QIAquick Gel Extraction Kit (QIAGEN, Inc., Valencia, Calif.), and the fragment containing the entire open reading frame was subcloned into the pET30b vector (EMD Biosciences-Novagen, Madison, Wis.) that had been digested with restriction endonucleases BamHI and HindIII. The fragment and vector were ligated overnight with T4 DNA ligase at 16° C. to yield pET30b/His-iBoNT/A (H227Y). An aliquot of the ligation mixture was transformed by a standard heat-shock protocol into chemically competent TOP10 cells (Invitrogen, Inc, Carlsbad, Calif.), plated onto 1.5% Luria-Bertani agar plates (pH 7.0) containing 50 μg/mL of Kanamycin, and placed in a 37° C. incubator for overnight growth. Candidate expression constructs were selected as Kanamycin-resistant colonies. Resistant colonies were used to inoculate 2 mL of Luria-Bertani media containing 50 μg/mL of Kanamycin that were then grown in a 37° C. incubator, shaking at 250 rpm, overnight. The bacteria cells were harvested by microcentrifugation and the plasmid DNA was isolated using QIAGEN miniprep kits (QIAGEN, Inc., Valencia, Calif.). Candidate expression constructs were screened by restriction digestion with BamHI and PstI to determine the presence and orientation of the correct insert fragment. Cultures containing the desired expression construct were used to inoculate 1 L baffled flasks containing 200 mL of Luria-Bertani media containing 50 μg/mL of Kanamycin and placed in a 37° C. incubator, shaking at 250 rpm, for overnight growth. Purified plasmid DNA corresponding to an expression construct was isolated using the QIAGEN Maxi-prep method (QIAGEN, Inc., Valencia, Calif.) and sequenced to verify that the correct expression construct was made. This cloning strategy yielded a pET30b expression construct comprising the nucleic acid molecule of SEQ ID NO: 118 encoding a iBoNT/A (H227Y) operably-linked to an amino-terminal enterokinase cleavable polyhistidine affinity binding peptide of SEQ ID NO: 119.

### Example 8

### Expression of pET30b/His-iBoNT/A (H227Y) and His-iBoNT/A (H227Y) Purification and Quantification

[0173] The following example illustrates a procedure useful for expressing a BoNT/A from an expression construct disclosed in the present specification. A pET30b/His-iBoNT/A (H227Y) expression construct was introduced into chemically competent E. coli BL21 (DE3) cells (Invitrogen, Inc, Carlsbad, Calif.) using a heat-shock transformation protocol. The heat-shock reaction was plated onto 1.5% Luria-Bertani agar plates (pH 7.0) containing 50 μg/mL of Kanamycin and placed in a 37° C. incubator for overnight growth. Kanamycin-resistant colonies of transformed E. coli containing pET30b/His-iBoNT/A (H227Y) were used to inoculate a baffled flask containing 3.0 mL of PA-0.5G media containing 50 μg/mL of Kanamycin which was then placed in a 37° C. incubator, shaking at 250 rpm, for overnight growth. The resulting overnight starter culture was in turn used to inoculate a 3 L baffled flask containing ZYP-5052 autoinducing media containing 50 μg/mL of Kanamycin at a dilution of 1:1000. Culture volumes ranged from about 600 mL (20% flask volume) to about 750 mL (25% flask volume). These cultures were grown in a 37° C. incubator shaking at 250 rpm for approximately 5.5 hours and were then transferred to a 16° C. incubator shaking at 250 rpm for overnight expression. Cells were harvested by centrifugation (4,000 rpm at 4° C. for 20-30 minutes) and used immediately, or stored dry at −80° C. until needed.

[0174] His-iBoNT/A (H227Y) expressed from a pET30b/His-iBoNT/A (H227Y) expression construct was purified and quantified as described above in Example 6. To analyze the His-iBoNT/A (H227Y) expression levels, His-iBoNT/A (H227Y) was purified using the purification procedure, as described in Example 6. Expression from each culture was evaluated by a Bradford dye assay, polyacrylamide gel electrophoresis and Western blot analysis (as described in Example 6; see FIG. 6a). Average total yields of His-iBoNT/A (H227Y) were approximately 4-5 mg/L as determined by a Bradford assay.

### Example 9

### Construction of pET30b/His-BoNT/A

[0175] A plasmid comprising a modified open reading frame encoding an active BoNT/A (FIG. 2), was prepared by in vitro site-directed mutagenesis of pET30b/His-iBoNT/A (H227Y). Correction of the inactivating H227Y mutation was accomplished in a single site-directed mutagenesis step using the procedure described in Example 3 and the following two oligonucleotides to yield pRSETb/His-BoNT/A: Y227H Primer Pair, sense oligonucleotide, 5′-GTGACCTTGGCACATGAACTTATTCATGCCGGGCATC GCTTGTATGGAATCGCC-3′ (SEQ ID NO: 102) and antisense oligonucleotide, 5′-GGCGATTCCATACA AGCGATGCCCGGCATGAATAAGTTCATGTGCCAAGGTCAC-3′ (SEQ ID NO: 103). The amino acid numbering corresponds to native sequence lacking an amino-terminal polyhistidine tag. The nucleotides that were changed to correct H227Y are shown in bold and underlined. This mutagenesis resulted in the modified open reading frame of SEQ ID NO: 110 encoding the active His-BoNT/A of SEQ ID NO: 111.

[0176] Activity was identified by proteolytic cleavage of a GFP-SNAP25 substrate using a GFP-SNAP25 Fluorescence Release Assay, see, e.g., Lance E. Steward et al., GFP-SNAP25 Fluorescence Release Assay for Botulinum Neurotoxin Protease Activity, U.S. Patent Publication No. 2005/0100973 (May 12, 2005). Candidate pET30b/His-BoNT/A expression constructs were transformed into chemically competent E. coli BL21 (DE3) cells (Invitrogen, Inc, Carlsbad, Calif.) using a heat-shock method, plated onto 1.5% Luria-Bertani agar plates (pH 7.0) containing 50 μg/mL of Kanamycin, and placed in a 37° C. incubator for overnight growth. Kanamycin-resistant colonies containing the pET30b/His-BoNT/A candidates were used to inoculate 1 mL cultures of ZYP-5052 autoinducing media containing 50 μg/mL of Kanamycin in Eppendorf Lid-Bac tubes fitted with membrane lids. The cultures were incubated in a thermomixer (1,400 rpm at 37° C.) located in a biosafety cabinet until turbid (approximately 7-8 hours). The temperature was then reduced to 22° C. and the cultures incubated for approximately 16 hours. The cells were collected by centrifugation (6,000×g at 4° C. for 30 minutes), decanted and frozen briefly at −80° C. to improve lysis. The cell pellets were defrosted on ice, each was resuspended in 350 μL of BugBuster® lysis solution (EMD Biosciences-Novagen, Madison, Wis.) containing 25 units/mL of benzonase nuclease (EMD Biosciences-Novagen, Madison, Wis.), 1 KU/mL rLysozyme (EMD Biosciences-Novagen, Madison, Wis.) and 2×Protease Inhibitor Cocktail III (EMD Biosciences-Novagen, Madison, Wis.) and the mixtures were incubated for 30 minutes at 22° C., 400 rpm in the thermomixer. The lysates were clarified by centrifugation (36,000×g at 4° C. for 15 minutes) and the supernatant solutions transferred to low-retention microcentrifuge tubes and placed on ice.

[0177] Activity of His-BoNT/A candidates was identified by proteolytic cleavage of a GFP-SNAP25 substrate. Each assay reaction contained 25 μL of 2× Toxin Reaction Buffer (100 mM N-(2-hydroxyethyl)piperazine-N′-(2-ethanesulfonic acid) (HEPES), pH 7.4; 20 μM zinc chloride; 20 mM dithiothreitol; 0.2% (v/v) TWEEN-20®, polyoxyethylene (20) sorbitan monolaureate), 10 μL of clarified lysate, and 15 μL of 50 μM GFP-SNAP25₍₁₃₄₋₂₀₆₎ substrate. The control reactions contained 10 μL of either water or 0.2 μg/mL of LC/A in lieu of lysate. The reactions were assembled in triplicate, incubated at 37° C. for 1 hour and then quenched with 20 μL of 8 M guanidine hydrochloride. The quenched reactions were transferred to filter-plate wells containing 75 μL of TALON™ SuperFlow Co²⁺ affinity resin (BD Biosciences-Clontech, Palo Alto, Calif.) that had been conditioned by rinsing with 200 μL of deionized, distilled water and 200 μL of Assay Rinse Buffer (50 mM N-(2-hydroxyethyl)piperazine-N′-(2-ethanesulfonic acid) (HEPES), pH 7.4). Following 15 minutes incubation on the resin, the reaction solutions were eluted by vacuum filtration, collected in a black 96-well plate, passed over the resin beds twice more and collected after the final pass. Each resin bed was then rinsed with 210 μL of Assay Rinse Buffer which was eluted into the plate containing the reaction solutions. The fluorescence of the eluant reaction solutions was measured with a SpectraMax Gemini XS spectrophotometer (Molecular Devices, λ_{Ex} 474 nm; λ_{Em} 509 nm; 495 nm cutoff filter). The control reactions contained 10 μL of either water or 0.2 μg/mL of LC/A in lieu of lysate. Positive His-BoNT/A candidates showed significant protease activity (see FIG. 3).

### Example 10

### Comparison of His-BoNT/A Amounts Expressed from Modified and Unmodified Open Reading Frames

[0178] The amount of increased BoNT/A expressed from a modified open reading frame as compared to an unmodified open reading frame can be determined as follows. In separate reactions, a pET30b/His-BoNT/A expression construct comprising the modified open reading frame of SEQ ID NO: 3 and a pET30b/His-BoNT/A construct comprising the unmodified open reading frame of SEQ ID NO: 2 are introduced into chemically competent E. coli BL21 (DE3) cells (Invitrogen, Inc, Carlsbad, Calif.) using a heat-shock transformation protocol. The heat-shock reactions are plated onto 1.5% Luria-Bertani agar plates (pH 7.0) containing 50 μg/mL of Kanamycin and are placed in a 37° C. incubator for overnight growth. Kanamycin-resistant colonies of transformed E. coli containing pET30b/His-BoNT/A constructs from both expression constructs are used to inoculate separate 15 mL tubes containing 3.0 mL Kanamycin-resistance selective PA-0.5G media that are then placed in a 37° C. incubator, shaking at 250 rpm, for overnight growth. Approximately 600 μL of the resulting overnight starter culture from each construct is used to inoculate a 3.0 L baffled flask containing 600 mL Kanamycin-resistance, ZYP-5052 autoinducing media. The inoculated cultures are grown in a 37° C. incubator shaking at 250 rpm for approximately 5.5 hours and are then transferred to a 16° C. incubator shaking at 250 rpm for overnight expression. Cells are harvested by centrifugation (4,000 rpm at 4° C. for 20-30 minutes).

[0179] To analyze the His-BoNT/A expression levels obtained from both the modified and unmodified open reading frames, His-BoNT/A is purified using the IMAC procedure, as described in Example 8. Expression from each culture is evaluated by a Bradford dye assay, polyacrylamide gel electrophoresis and Western blot analysis (as described in Example 6) in order to determine whether the amounts of His-BoNT/A produced from the modified open reading frame of SEQ ID NO: 3 is greater when compared to the amount of His-BoNT/A expressed from the unmodifed open reading frame of SEQ ID NO: 2. A five-fold increase in the amount of active His-BoNT/A expressed from a modified open reading frame is anticipated. Average amounts of IMAC purified active His-BoNT/A expressed from a modified open reading frame is expected to be approximately 5 mg/L, while IMAC purified active His-BoNT/A expressed from a unmodified open reading frame in an otherwise identical nucleic acid molecule is expected to be approximately 1 mg/L.

### Example 11

### Construction of pET29b/iBoNT/A-KHis (H227Y)

[0180] To construct pET29b/iBoNT/A-KHis (H227Y), a three step strategy was employed to first remove two internal NdeI restriction endonuclease sites from the open reading frame encoding iBoNT/A (H227Y) from a pRSETb/His-iBoNT/A (H227Y) construct and then, to add a carboxyl terminal lysine residue to iBoNT/A (H227Y), and lastly to subclone this modified fragment into a pET29b vector. The two internal NdeI restriction endonuclease sites from the open reading frame encoding iBoNT/A (H227Y) were removed using a site-directed mutagenesis protocol. A 50 μL reaction was assembled with the pRSETb/iBoNT/A (H227Y) expression construct as a template, reagents included with the QuickChange® II XL Site-Directed Mutagenesis kit (Stratagene, La Jolla, Calif.) and the following four oligonucleotide primers: SL103 Primer Pair, sense oligonucleotide, 5′-GATGAACTCGATGATCCCTTACGGTGTGAAAC GTCTGG-3′ (SEQ ID NO: 104) and antisense oligonucleotide, 5′-CCAGACGTTTCACACCGTAAGGGAT CATCGAGTTCATC-3′ (SEQ ID NO: 105); and SL104 Primer Pair, sense oligonucleotide, 5′-CCAGACGT TTCACACCGTAAGGGATCATCGAGTTCATC-3′ (SEQ ID NO: 106) and antisense oligonucleotide, 5′-GA TGAACTCGATGATCCCTTACGGTGTGAAACGTCTGG-3′ (SEQ ID NO: 107). A polymerase chain reaction (PCR) mix contained 5 μL of 10× Buffer, 1 μL of deoxyribonucleotides (dNTPs), 1 μL of PfuUltra™ High Fidelity DNA polymerase (2.5 units/μL), 125 ng of each primer, 50 ng of template DNA, and nuclease-free water to a final volume of 50 μL. The thermocycler conditions were: one cycle of 95° C. for 120 seconds; 20 cycles of 95° C. for 60 seconds, 55° C. for 30 seconds, and 72° C. for 20 minutes; one cycle of 72° C. for 9 minutes; and 10° C. to hold. Following thermocycling, 1 μL of DpnI restriction enzyme was added to the reaction and incubated for 2 hour at 37° C. to digest the template DNA. The reaction was purified by QIAquick kit (QIAGEN, Inc., Valencia, Calif.) and analysis by agarose gel electrophoresis showed that the reaction produced full-length plasmid. The mutagenesis products were transformed into chemically competent E. coli TOP10 cells (Invitrogen, Inc, Carlsbad, Calif.) using a heat shock method, plated on 1.5% Luria-Bertani agar plates (pH 7.0) containing 100 μg/mL of Ampicillin, and placed in a 37° C. incubator for overnight growth. Candidate constructs were isolated as Ampicillin-resistant colonies and analyzed using an alkaline lysis plasmid mini-preparation procedure to isolate the expression construct and NdeI restriction endonuclease digests to determine the presence of inserts without NdeI sites. Removal of the two internal NdeI sites was confirmed by sequence analysis of the entire open reading frame from candidate plasmid constructs. This cloning strategy yielded a pRSETb/His-iBoNT/A (H227Y) construct comprising an open reading frame lacking two internal NdeI restriction endonuclease sites.

[0181] The iBoNT/A (H227Y) encoded by the NdeI-modified pRSETb/His-iBoNT/A (H227Y) construct was subcloned into a pET29b vector by PCR amplification of the open reading frame using oligonucleotide primers that added a lysine residue at the carboxyl end of the protein which can serve as a trypsin cleavage site. A 50 μL reaction was assembled with the NdeI-modified pRSETb/His-iBoNT/A (H227Y) expression construct as a template, reagents included with the Expand High Fidelity PCR system (Roche Applied Science, Indianapolis, Ind.) and the following two oligonucleotide primers: SL101 Primer Pair, NdeI sense oligonucleotide, 5′-CGCCATATGCCGTTCGTAAACAAACAGTTC-3′ (SEQ ID NO: 108) and HindIII-K antisense oligonucleotide, 5′-CCCAAGCTTGTCGACTTTCAATGGGCGTTCTCC CCAACCGTC-3′ (SEQ ID NO: 109). A polymerase chain reaction (PCR) mix contained 5 μL of 10× Buffer, 1 μL of deoxyribonucleotides (dNTPs), 1 μL of PfuUltra™ High Fidelity DNA polymerase (2.5 units/μL), 125 ng of each primer, 100 ng of template DNA, and nuclease-free water to a final volume of 50 μL. The thermocycler conditions were: one cycle of 95° C. for 120 seconds; 25 cycles of 95° C. for 45 seconds, 55° C. for 60 seconds, and 72° C. for 3 minutes; one cycle of 72° C. for 7 minutes; and 10° C. to hold. The PCR-amplified product was digested with HindIII and NdeI at 37° C. for 2.5 hours to excise the iBoNT/A-K (H227Y) insert. The resulting restriction fragment was purified by the QIAquick Gel Extraction Kit (QIAGEN, Inc., Valencia, Calif.), and the fragment containing the open reading frame was subcloned into the pET29b vector (EMD Biosciences-Novagen, Madison, Wis.) that had been digested with restriction endonucleases HindIII and NdeI. The fragment and vector were ligated using T4 DNA ligase protocol to yield pET29b/BoNT/A-KHis (H227Y). An aliquot from this ligation mixture was transformed by a standard heat-shock protocol into competent TOP10 cells (Invitrogen, Inc, Carlsbad, Calif.), plated onto 1.5% Luria-Bertani agar plates (pH 7.0) containing 50 μg/mL of Kanamycin, and placed in a 37° C. incubator for overnight growth. Candidate expression constructs were selected as Kanamycin-resistant colonies. Resistant colonies were used to inoculate 2 mL of Luria-Bertani media containing 50 μg/mL of Kanamycin that were then grown in a 37° C. incubator, shaking at 250 rpm, overnight. The bacteria cells were harvested by microcentrifugation and the plasmid DNA was isolated using QIAGEN miniprep kits (QIAGEN, Inc., Valencia, Calif.). Candidate expression constructs were screened by restriction digestion with NdeI and HindIII to determine the presence of the correct insert fragment. Cultures containing the desired expression construct were used to inoculate 1 L baffled flasks containing 200 mL of Luria-Bertani media containing 50 μg/mL of Kanamycin and placed in a 37° C. incubator, shaking at 250 rpm, for overnight growth. Purified plasmid DNA corresponding to an expression construct was isolated using the QIAGEN Maxi-prep method (QIAGEN, Inc., Valencia, Calif.) and sequenced to verify that the correct expression construct was made. This cloning strategy yielded a pET29b expression construct comprising the nucleic acid molecule of SEQ ID NO: 120 encoding a iBoNT/A (H227Y) operably-linked to a carboxyl terminal lysine residue followed by a trypsin cleavable polyhistidine affinity binding peptide of SEQ ID NO: 121.

### Example 12

### Construction of pET29b/BoNT/A-KHis

[0182] A plasmid comprising a modified open reading frame encoding an active BoNT/A (FIG. 4), was prepared by in vitro site-directed mutagenesis of pET29b/iBoNT/A-KHis (H227Y). Correction of the inactivating H227Y mutation was accomplished in a single site-directed mutagenesis step using the procedure described in Example 3 and the following two oligonucleotides to yield pET29b/BoNT/A-KHis: Y227H Primer Pair, sense oligonucleotide, 5′-GTGACCTTGGCACATGAACTTATTCATGCCGGGCATC GCTTGTATGGAATCGCC-3′ (SEQ ID NO: 102) and antisense oligonucleotide, 5′-GGCGATTCCATACA AGCGATGCCCGGCATGAATAAGTTCATGTGCCAAGGTCAC-3′ (SEQ ID NO: 103). The amino acid numbering corresponds to native sequence lacking an amino-terminal polyhistidine tag. The nucleotides that were changed to correct H227Y are shown in bold and underlined. This mutagenesis resulted in the modified open reading frame of SEQ ID NO: 112 encoding the active BoNT/A-KHis of SEQ ID NO: 113.

[0183] Activity of BoNT/A-KHis candidates was identified by proteolytic cleavage of a GFP-SNAP25 substrate using a GFP-SNAP25 Fluorescence Release Assay, see, e.g., Lance E. Steward et al., GFP-SNAP25 Fluorescence Release Assay for Botulinum Neurotoxin Protease Activity, U.S. Patent Publication No. 2005/0100973 (May 12, 2005). Candidate pET29b/BoNT/A-KHis expression constructs were transformed into chemically competent E. coli BL21 (DE3) cells (Invitrogen, Inc, Carlsbad, Calif.) using a heat-shock method, plated onto 1.5% Luria-Bertani agar plates (pH 7.0) containing 50 μg/mL of Kanamycin, and placed in a 37° C. incubator for overnight growth. Kanamycin-resistant colonies containing the pET29b/BoNT/A-KHis candidates were used to inoculate 1 mL cultures of ZYP-5052 autoinducing media containing 50 μg/mL of Kanamycin in Eppendorf Lid-Bac tubes fitted with membrane lids. The cultures were incubated in a thermomixer (1,400 rpm at 37° C.) located in a biosafety cabinet until turbid (approximately 7-8 hours). The temperature was then reduced to 22° C. and the cultures incubated for approximately 16 hours. The cells were collected by centrifugation (6,000×g at 4° C. for 30 minutes), decanted and frozen briefly at −80° C. to improve lysis. The cell pellets were defrosted on ice, each was resuspended in 350 μL of BugBuster® lysis solution (EMD Biosciences-Novagen, Madison, Wis.) containing 25 units/mL of benzonase nuclease (EMD Biosciences-Novagen, Madison, Wis.), 1 KU/mL rLysozyme (EMD Biosciences-Novagen, Madison, Wis.) and 2×Protease Inhibitor Cocktail III (EMD Biosciences-Novagen, Madison, Wis.) and the mixtures were incubated for 30 minutes at 22° C., 400 rpm in the thermomixer. The lysates were clarified by centrifugation (36,000×g at 4° C. for 15 minutes) and the supernatant solutions transferred to low-retention microcentrifuge tubes and placed on ice.

[0184] Activity of BoNT/A-KHis candidates was identified by proteolytic cleavage of a GFP-SNAP25 substrate. Each assay reaction contained 25 μL of 2× Toxin Reaction Buffer (100 mM N-(2-hydroxyethyl)piperazine-N′-(2-ethanesulfonic acid) (HEPES), pH 7.4; 20 μM zinc chloride; 20 mM dithiothreitol; 0.2% (v/v) TWEEN-20®, polyoxyethylene (20) sorbitan monolaureate), 10 μL of clarified lysate, and 15 μL of 50 μM GFP-SNAP25₍₁₃₄₋₂₀₆₎ substrate. The control reactions contained 10 μL of either water or 0.2 μg/mL of LC/A in lieu of lysate. The reactions were assembled in triplicate, incubated at 37° C. for 1 hour and then quenched with 20 μL of 8 M guanidine hydrochloride. The quenched reactions were transferred to filter-plate wells containing 75 μL of TALON™ SuperFlow Co²⁺ affinity resin (BD Biosciences-Clontech, Palo Alto, Calif.) that had been conditioned by rinsing with 200 μL of deionized, distilled water and 200 μL of Assay Rinse Buffer (50 mM N-(2-hydroxyethyl)piperazine-N-(2-ethanesulfonic acid) (HEPES), pH 7.4). Following 15 minutes incubation on the resin, the reaction solutions were eluted by vacuum filtration, collected in a black 96-well plate, passed over the resin beds twice more and collected after the final pass. Each resin bed was then rinsed with 210 μL of Assay Rinse Buffer which was eluted into the plate containing the reaction solutions. The fluorescence of the eluant reaction solutions was measured with a SpectraMax Gemini XS spectrophotometer (Molecular Devices, λ_{Ex} 474 nm; λ_{Em} 509 nm; 495 nm cutoff filter). The control reactions contained 10 μL of either water or 0.2 μg/mL of LC/A in lieu of lysate. Positive BoNT/A-KHis candidates showed significant protease activity (see FIG. 5).

### Example 13

### Expression of pET29b/BoNT/A-KHis

[0185] The following example illustrates a procedure useful for expressing a BoNT/A from an expression construct disclosed in the present specification. An pET29b/BoNT/A-KHis expression construct was introduced into chemically competent E. coli BL21 (DE3) cells (Invitrogen, Inc, Carlsbad, Calif.) using a heat-shock transformation protocol. The heat-shock reaction was plated onto 1.5% Luria-Bertani agar plates (pH 7.0) containing 50 μg/mL of Kanamycin and placed in a 37° C. incubator for overnight growth. Kanamycin-resistant colonies of transformed E. coli containing pET29b/BoNT/A-KHis were used to inoculate a baffled flask containing 3.0 mL of PA-0.5G media containing 50 μg/mL of Kanamycin which was then placed in a 37° C. incubator, shaking at 250 rpm, for overnight growth. The resulting overnight starter culture was in turn used to inoculate a 3 L baffled flask containing ZYP-5052 autoinducing media containing 50 μg/mL of Kanamycin at a dilution of 1:1000. Culture volumes ranged from about 600 mL (20% flask volume) to about 750 mL (25% flask volume). These cultures were grown in a 37° C. incubator shaking at 250 rpm for approximately 5.5 hours and were then transferred to a 16° C. incubator shaking at 250 rpm for overnight expression. Cells were harvested by centrifugation (4,000 rpm at 4° C. for 20-30 minutes) and used immediately, or stored dry at −80° C. until needed.

### Example 14

### Purification and Quantification of BoNT/A-KHis

[0186] The following example illustrates methods useful for purification and quantification of BoNT/A disclosed in the present specification. For immobilized metal affinity chromatography (IMAC) protein purification, E. coli BL21 (DE3) cell pellets used to express BoNT/A-KHis, as described in Example 8, were resuspended in Column Binding Buffer (25 mM N-(2-hydroxyethyl)piperazine-N′-(2-ethanesulfonic acid) (HEPES), pH 7.8; 500 mM sodium chloride; 10 mM imidazole; 2× Protease Inhibitor Cocktail Set III (EMD Biosciences-Calbiochem, San Diego Calif.); 5 units/mL of Benzonase (EMD Biosciences-Novagen, Madison, Wis.); 0.1% (v/v) Triton-X® 100, 4-octylphenol polyethoxylate; 10% (v/v) glycerol), and then transferred to a cold Oakridge centrifuge tube. The cell suspension was sonicated on ice (10-12 pulses of 10 seconds at 40% amplitude with 60 seconds cooling intervals on a Branson Digital Sonifier) in order to lyse the cells and release the BoNT/A-KHis, and then centrifuged (16,000 rpm at 4° C. for 20 minutes) to clarify the lysate. An immobilized metal affinity chromatography column was prepared using a 20 mL Econo-Pac column support (Bio-Rad Laboratories, Hercules, Calif.) packed with 2.5-5.0 mL of TALON™ SuperFlow Co²⁺ affinity resin (BD Biosciences-Clontech, Palo Alto, Calif.), which was then equilibrated by rinsing with 5 column volumes of deionized, distilled water, followed by 5 column volumes of Column Binding Buffer. The clarified lysate was applied slowly to the equilibrated column by gravity flow (approximately 0.25-0.3 mL/minute). The column was then washed with 5 column volumes of Column Wash Buffer (N-(2-hydroxyethyl)piperazine-N′-(2-ethanesulfonic acid) (HEPES), pH 7.8; 500 mM sodium chloride; 10 mM imidazole; 0.1% (v/v) Triton-X® 100, 4-octylphenol polyethoxylate; 10% (v/v) glycerol). BoNT/A-His was eluted with 20-30 mL of Column Elution Buffer (25 mM N-(2-hydroxyethyl)piperazine-N′-(2-ethanesulfonic acid) (HEPES), pH 7.8; 500 mM sodium chloride; 500 mM imidazole; 0.1% (v/v) Triton-X® 100, 4-octylphenol polyethoxylate; 10% (v/v) glycerol) and collected in approximately twelve 1 mL fractions. The amount of BoNT/A-KHis contained in each elution fraction was determined by a Bradford dye assay and the five fractions with the strongest signal were considered the elution peak and pooled (see FIG. 6b). Total protein yield was determined by estimating the total protein concentration of the pooled peak elution fractions using bovine gamma globulin as a standard (Bio-Rad Laboratories, Hercules, Calif.).

[0187] For purification of a BoNT/A using a FPLC desalting column, a HiPrep™ 26/10 size exclusion column (Amersham Biosciences, Piscataway, N.J.) was pre-equilibrated with 80 mL of 4° C. Column Buffer (50 mM sodium phosphate, pH 6.5). After the column was equilibrated, a BoNT/A-KHis sample was applied to the size exclusion column with an isocratic mobile phase of 4° C. Column Buffer and at a flow rate of 10 mL/minute using a BioLogic DuoFlow chromatography system (Bio-Rad Laboratories, Hercules, Calif.). The desalted BoNT/A-His sample was collected as a single fraction of approximately 7-12 mL.

[0188] For purification of a BoNT/A using a FPLC ion exchange column, a BoNT/A-KHis sample that had been desalted following elution from an IMAC column was applied to a 1 mL UNO-S1™ cation exchange column (Bio-Rad Laboratories, Hercules, Calif.) using a BioLogic DuoFlow chromatography system (Bio-Rad Laboratories, Hercules, Calif.). The sample was applied to the column in 4° C. Column Buffer (50 mM sodium phosphate, pH 6.5) and eluted by linear gradient with 4° C. Elution Buffer (50 mM sodium phosphate, 1 M sodium chloride, pH 6.5) as follows: step 1, 5.0 mL of 5% Elution Buffer at a flow rate of 1 mL/minute; step 2, 20.0 mL of 5-30% Elution Buffer at a flow rate of 1 mL/minute; step 3, 2.0 mL of 50% Elution Buffer at a flow rate of 1.0 mUminute; step 4, 4.0 mL of 100% Elution Buffer at a flow rate of 1.0 mL/minute; and step 5, 5.0 mL of 0% Elution Buffer at a flow rate of 1.0 mL/minute. Elution of peptides from the column was monitored at 280, 260, and 214 nm, and peaks absorbing above a minimum threshold (0.01 au) at 280 nm were collected. Most of the BoNT/A-KHis eluted at a sodium chloride concentration of approximately 100 to 200 mM. Average total yields of BoNT/A-His were approximately 7-12 mg/L as determined by a Bradford assay.

[0189] Expression of BoNT/A-KHis was analyzed by polyacrylamide gel electrophoresis. Samples purified using the procedure described above were added to 2× LDS Sample Buffer (Invitrogen, Inc, Carlsbad, Calif.) and peptides separated by MOPS polyacrylamide gel electrophoresis using NuPAGE® Novex 4-12% Bis-Tris precast polyacrylamide gels (Invitrogen, Inc, Carlsbad, Calif.) under denaturing, reducing conditions. Gels were stained with SYPRO® Ruby (Bio-Rad Laboratories, Hercules, Calif.) and the separated peptides imaged using a Fluor-S MAX Multilmager (Bio-Rad Laboratories, Hercules, Calif.) for quantification of peptide expression levels. The size and amount of the BoNT/A-His was determined by comparison to MagicMark™ protein molecular weight standards (Invitrogen, Inc, Carlsbad, Calif.). The gels revealed what appeared to be a full-length BoNT/A-KHis.

[0190] Expression of BoNT/A-KHis was also analyzed by Western blot analysis. Protein samples purified using the procedure described above were added to 2× LDS Sample Buffer (Invitrogen, Inc, Carlsbad, Calif.) and separated by MOPS polyacrylamide gel electrophoresis using NuPAGE® Novex 4-12% Bis-Tris precast polyacrylamide gels (Invitrogen, Inc, Carlsbad, Calif.) under denaturing, reducing conditions. Separated peptides were transferred from the gel onto polyvinylidene fluoride (PVDF) membranes (Invitrogen, Inc, Carlsbad, Calif.) by Western blotting using a Trans-Blot® SD semi-dry electrophoretic transfer cell apparatus (Bio-Rad Laboratories, Hercules, Calif.). PVDF membranes were blocked by incubating at room temperature for 2 hours in a solution containing 25 mM Tris-Buffered Saline (25 mM 2-amino-2-hydroxymethyl-1,3-propanediol hydrochloric acid (Tris-HCl)(pH 7.4), 137 mM sodium chloride, 2.7 mM potassium chloride), 0.1 % TWEEN-20®, polyoxyethylene (20) sorbitan monolaureate, 2% bovine serum albumin, 5% nonfat dry milk. Blocked membranes were incubated at 4° C. for overnight in Tris-Buffered Saline TWEEN-20® (25 mM Tris-Buffered Saline, 0.1% TWEEN-20®, polyoxyethylene (20) sorbitan monolaureate) containing one of the following primary antibodies as a probe: a 1:5,000 dilution of rabbit polyclonal anti-BoNT/A antiserum (Allergan, Inc.); or a 1:10,000 dilution of rabbit polyclonal anti-polyhistidine antiserum (Abcam Inc., Cambridge, Mass.). Primary antibody probed blots were washed three times for 15 minutes each time in Tris-Buffered Saline TWEEN-20®. Washed membranes were incubated at room temperature for 2 hours in Tris-Buffered Saline TWEEN-20® containing a 1:20,000 dilution of goat polyclonal anti-rabbit immunoglobulin G, heavy and light chains (IgG, H+L) antibody conjugated to horseradish peroxidase (HRP; Pierce Biotechnology, Inc., Rockford, Ill.) as a secondary antibody. Secondary antibody-probed blots were washed three times for 15 minutes each time in Tris-Buffered Saline TWEEN-20®. Signal detection of the labeled BoNT/A-KHis was visualized using the ECL Plus™ Western Blot Detection System (Amersham Biosciences, Piscataway, N.J.) and imaged with a Typhoon 9410 Variable Mode Imager (Amersham Biosciences, Piscataway, N.J.) for quantification of peptide expression levels.

### Example 15

### Comparison of BoNT/A-His Amounts Expressed from Modified and Unmodified Open Reading Frames

[0191] The amount of increased BoNT/A expressed from a modified open reading frame as compared to an unmodified open reading frame can be determined as follows. In separate reactions, a pET29b/BoNT/A-KHis expression construct comprising the modified open reading frame of SEQ ID NO: 112 and a pET29b/BoNT/A-KHis construct comprising the unmodified open reading frame of SEQ ID NO: 115 are introduced into chemically competent E. coli BL21 (DE3) cells (Invitrogen, Inc, Carlsbad, Calif.) using a heat-shock transformation protocol. The heat-shock reactions are plated onto 1.5% Luria-Bertani agar plates (pH 7.0) containing 50 μg/mL of Kanamycin and are placed in a 37° C. incubator for overnight growth. Kanamycin-resistant colonies of transformed E. coli containing pET29b/BoNT/A-KHis constructs from both expression construct are used to inoculate separate 15 mL tubes containing 3.0 mL Kanamycin-resistance selective PA-0.5G media that are then placed in a 37° C. incubator, shaking at 250 rpm, for overnight growth. Approximately 600 μL of the resulting overnight starter culture from each construct are used to inoculate a 3.0 L baffled flask containing 600 mL Kanamycin-resistance, ZYP-5052 autoinducing media. The inoculated cultures are grown in a 37° C. incubator shaking at 250 rpm for approximately 5.5 hours and are then transferred to a 16° C. incubator shaking at 250 rpm for overnight expression. Cells are harvested by centrifugation (4,000 rpm at 4° C. for 20-30 minutes).

[0192] To analyze the BoNT/A-KHis expression amounts obtained from both the unmodified and modified open reading frames, BoNT/A-KHis is purified using the IMAC procedure (as described in Example 14). Expression from each culture is evaluated by a Bradford dye assay, polyacrylamide gel electrophoresis and Western blot analysis (as described in Example 14) in order to determine whether the amounts of BoNT/A-KHis produced from the modified open reading frame of SEQ ID NO: 112 is greater as compared to the amount of BoNT/A-KHis expressed from the unmodifed open reading frame of SEQ ID NO: 115. An approximately 12-fold increase in the amount of active BoNT/A-KHis expressed from a modified open reading frame is anticipated. Average amounts of IMAC purified active BoNT/A-KHis expressed from a modified open reading frame is expected to be approximately 12 mg/L, while IMAC purified active BoNT/A-KHis expressed from a unmodified open reading frame in an otherwise identical nucleic acid molecule is expected to be approximately 1 mg/L.

### Example 16

### Construction and Expression of pRSET/BoNT/A-His

[0193] Restriction endonuclease sites suitable for cloning an operably linked nucleic acid molecule into a pRSET vector (Invitrogen, Inc, Carlsbad, Calif.) are incorporated into the 5′- and 3′ ends of modified open reading frame SEQ ID NO: 3. This nucleic acid molecule is synthesized and a pUCBHB1/BoNT/A construct obtained as described in Example 2. This construct is digested with restriction enzymes that 1) excise the insert containing the open reading frame of SEQ ID NO: 3 encoding an active BoNT/A; and 2) enable this insert to be operably-linked to a pRSET vector. This insert is subcloned using a T4 DNA ligase procedure into a pRSET vector that is digested with appropriate restriction endonucleases to yield pRSET/BoNT/A-His (FIG. 7). The ligation mixture is transformed into chemically competent E. coli DH5α cells (Invitrogen, Inc, Carlsbad, Calif.) using a heat shock method, plated on 1.5% Luria-Bertani agar plates (pH 7.0) containing 100 μg/mL of Ampicillin, and placed in a 37° C. incubator for overnight growth. Bacteria containing expression constructs are identified as Ampicillin resistant colonies. Candidate constructs are isolated using an alkaline lysis plasmid mini-preparation procedure and analyzed by restriction endonuclease digest mapping to determine the presence and orientation of the insert. This cloning strategy yields a prokaryotic expression construct encoding an active BoNT/A operably linked to carboxyl-terminal polyhistidine binding peptide. A similar cloning strategy is used to make a pRSET construct containing the unmodified open reading frame of SEQ ID NO: 2 used as a control for expression levels, as well as, to produce pRSET expression constructs in which any one of the modified open reading frames of SEQ ID NO: 4 through SEQ ID NO: 33 is operably linked to a pRSET vector.

[0194] The amount of increased BoNT/A expression from a modified open reading frame is determined as follows. In separate reactions, a pRSET/BoNT/A-His expression construct comprising a modified open reading frame, such as, e.g., SEQ ID NO: 3 through SEQ ID NO: 33, and a pRSET/BoNT/A-His construct comprising an unmodified open reading frame, such as, e.g., SEQ ID NO: 2 are introduced into chemically competent bacterial cells suitable for expression of the pRSET expression construct using a standard transformation protocol, such as, e.g., a heat-shock transformation protocol. The transformation reactions are plated onto 1.5% Luria-Bertani agar plates (pH 7.0) containing suitable antibiotics and placed in a 37° C. incubator for overnight growth. Antibiotic-resistant colonies of transformed cells containing pRSET/BoNT/A-His constructs from both nucleic acid molecules are used to inoculate separate 15 mL tubes containing 3.0 mL antibiotic-resistance selective PA-0.5G media that are then placed in a 37° C. incubator, shaking at 250 rpm, for overnight growth. Approximately 600 μL of the resulting overnight starter culture from each construct is used to inoculate a 3.0 L baffled flask containing 600 mL of a suitable antibiotic-resistance growth media. The inoculated cultures are grown in a 37° C. incubator shaking at 250 rpm for approximately 5.5 hours and are then induced by adding IPTG to a final concentration of 0.5-1.0 mM, and the cultures are transferred to a 16° C. incubator shaking at 250 rpm for overnight expression. Cells are harvested by centrifugation (4,000 rpm at 4° C. for 20-30 minutes).

[0195] To analyze the BoNT/A-His expression levels obtained from both the native and modified nucleic acid molecules, BoNT/A-His is purified using the IMAC procedure (as described in Examples 6 and 14). Expression from each culture is evaluated by a Bradford dye assay, polyacrylamide gel electrophoresis and Western blot analysis using either anti-BoNT/A or anti-His antibodies (as described in Examples 6 and 14) in order to determine whether the amounts of BoNT/A-His produced from the modified open reading frame is greater relative to the amount of BoNT/A-His expressed from the unmodifed open reading frame of SEQ ID NO: 2.

### Example 17

### Construction and Expression of pPICZ A/BoNT/A-myc-His

[0196] Restriction endonuclease sites suitable for cloning an operably linked nucleic acid molecule into a pPIC A vector (Invitrogen, Inc, Carlsbad, Calif.) are incorporated into the 5′- and 3′ ends of modified open reading frame SEQ ID NO: 36. This nucleic acid molecule is synthesized and a pUCBHB1/BoNT/A construct is obtained as described in Example 2. This construct is digested with restriction enzymes that 1) excise the insert containing the open reading frame of SEQ ID NO: 36 encoding an active BoNT/A; and 2) enable this insert to be operably-linked to a pPIC A vector. This insert is subcloned using a T4 DNA ligase procedure into a pPIC A vector that is digested with appropriate restriction endonucleases to yield pPIC A/BoNT/A-myc-His (FIG. 8). The ligation mixture is transformed into chemically competent E. coli DH5α cells (Invitrogen, Inc, Carlsbad, Calif.) using a heat shock method, plated on 1.5% low salt Luria-Bertani agar plates (pH 7.5) containing 25 μg/mL of Zeocin™, and placed in a 37° C. incubator for overnight growth. Bacteria containing expression constructs are identified as Zeocin™ resistant colonies. Candidate constructs are isolated using an alkaline lysis plasmid mini-preparation procedure and analyzed by restriction endonuclease digest mapping to determine the presence and orientation of the insert. This cloning strategy yields a yeast expression construct encoding an active BoNT/A operably linked to carboxyl-terminal c-myc and polyhistidine binding peptides. A similar cloning strategy is used to make a pPIC A expression construct containing the unmodifed open reading frame of SEQ ID NO: 2 used as a control for expression levels, as well as, to produce pPIC A expression constructs in which any one of the modified open reading frames of SEQ ID NO: 34, SEQ ID NO: 35, SEQ ID NO: 37 through SEQ ID NO: 45 is operably linked to a pPIC A vector.

[0197] To construct a yeast cell line expressing an active BoNT/A, pPICZ A/BoNT/A-myc-His is digested with a suitable restriction endonuclease (i.e., SacI, PmeI or BstXI) and the resulting linearized expression construct is transformed into an appropriate P. pastoris Mut^{s} strain KM71H using an electroporation method. The transformation mixture is plated on 1.5% YPDS agar plates (pH 7.5) containing 100 μg/mL of Zeocin™ and placed in a 28-30° C. incubator for 1-3 days of growth. Selection of transformants integrating the pPICZ A/BoNT/A-myc-His at the 5′ AOX1 locus is determined by colony resistance to Zeocin™. A similar strategy is used to make a cell line containing a pPICZ A expression construct containing SEQ ID NO: 2 used as a control for expression levels. Cell lines integrating a pPICZ A/BoNT/A-myc-His construct is tested for BoNT/A-myc-His expression using a small-scale expression test. Isolated colonies from test cell lines that have integrated pPICZ A/BoNT/A-myc-His are used to inoculate 1.0 L baffled flasks containing 100 mL of MGYH media and grown at about 28-30° C. in a shaker incubator (250 rpm) until the culture reaches an OD₆₀₀=2-6 (approximately 16-18 hours). Cells are harvested by centrifugation (3,000×g at 22° C. for 5 minutes). To induce expression, the cell pellet is resuspended in 15 mL of MMH media and 100% methanol is added to a final concentration of 0.5%. Cultures are grown at about 28-30° C. in a shaker incubator (250 rpm) for six days. Additional 100% methanol is added to the culture every 24 hours to a final concentration of 0.5%. A 1.0 mL test aliquot is taken from the culture every 24 hours starting at time zero and ending at time 144 hours. Cells are harvested from the aliquots by microcentrifugation to pellet the cells and lysed using three freeze-thaw rounds consisting of −80° C. for 5 minutes, then 37° C. for 5 minutes. Lysis samples are added to 2× LDS Sample Buffer (Invitrogen, Inc, Carlsbad, Calif.) and expression from established cell lines is measured by Western blot analysis (as described in Examples 6 and 14) using either anti-BoNT/A, anti-myc or anti-His antibodies in order to identify lines expressing increased amounts of BoNT/A-myc-His produced from SEQ ID NO: 36 relative to established cell lines expressing BoNT/A-myc-His from the SEQ ID NO: 2 control. The P. pastoris Mut^{s} KM71H cell line showing the highest expression level of BoNT/A-myc-His relative to the SEQ ID NO: 2 control is selected for large-scale expression using commercial fermentation procedures. Procedures for large-scale expression are as outlined above except the culture volume is approximately 2.5 L MGYH media grown in a 5 L BioFlo 3000 fermentor and concentrations of all reagents will be proportionally increased for this volume. For greater details on all procedures described in this example, see EasySelect™ Pichia Expression Kit, version G, A Manual of Methods for Expression of Recombinant Proteins Using pPICZ and pPICZα in Pichia pastoris, 122701, 25-0172 (Invitrogen, Inc, Carlsbad, Calif.).

### Example 18

### Construction and Expression of pMET/BoNT/A-V5-His

[0198] Restriction endonuclease sites suitable for cloning an operably linked nucleic acid molecule into a pMET vector (Invitrogen, Inc, Carlsbad, Calif.) are incorporated into the 5′- and 3′ ends of modified open reading frame SEQ ID NO: 36. This nucleic acid molecule is synthesized and a pUCBHB1/BoNT/A construct is obtained as described in Example 2. This construct is digested with restriction enzymes that 1) excise the insert containing the open reading frame of SEQ ID NO: 36 encoding an active BoNT/A; and 2) enable this insert to be operably-linked to a PMET vector. This insert is subcloned using a T4 DNA ligase procedure into a pMET vector that is digested with appropriate restriction endonucleases to yield pMET/BoNT/A-V5-His (FIG. 9). The ligation mixture is transformed into chemically competent E. coli DH5α cells (Invitrogen, Inc, Carlsbad, Calif.) using a heat shock method, plated on 1.5% low salt Luria-Bertani agar plates (pH 7.5) containing 100 μg/mL of Ampicillin, and placed in a 37° C. incubator for overnight growth. Bacteria containing expression constructs are identified as Ampicillin resistant colonies. Candidate constructs are isolated using an alkaline lysis plasmid mini-preparation procedure and analyzed by restriction endonuclease digest mapping to determine the presence and orientation of the insert. This cloning strategy yields a yeast expression construct encoding an active BoNT/A operably linked to carboxyl-terminal V5 and polyhistidine binding peptides. A similar cloning strategy is used to make a pMET expression construct containing the unmodifed open reading frame of SEQ ID NO: 2 used as a control for expression levels, as well as, to produce pMET expression constructs in which any one of the modified open reading frames of SEQ ID NO: 34, SEQ ID NO: 35, SEQ ID NO: 37 through SEQ ID NO: 45 is operably linked to a pMET vector.

[0199] To construct a yeast cell line expressing an active BoNT/A, pMET/BoNT/A-V5-His is digested with a suitable restriction endonuclease (i.e., ApaI, AscI, FseI, PacI, KpnI or PstI) and the resulting linearized expression construct is transformed into an appropriate P. methanolica Mut^{s} strain PMAD16 using an electroporation method. The transformation mixture is plated on 1.5% MD agar plates (pH 7.5) lacking adenine and grown in a 28-30° C. incubator for 3-4 days. Selection of transformants integrating the pMET/BoNT/A-V5-His is determined by colony growth on adenine-deficient media. A similar strategy is used to make a cell line containing a pMET expression construct containing SEQ ID NO: 2 used as a control for expression levels. Ade⁺ cell lines integrating a pMET/BoNT/A-V5-His construct are tested for BoNT/A-myc-His expression using a small-scale expression test. Isolated Ade⁺ colonies from test cell lines that have integrated pMET/BoNT/A-V5-His are used to inoculate 15 mL of BMDY media and cells are grown at about 28-30° C. in a shaker incubator (250 rpm) until the culture reaches an OD₆₀₀=2-10 (approximately 16-18 hours). Cells are harvested by centrifugation (1,500×g at 22° C. for 5 minutes). To induce expression, cell pellets are resuspended in 5 mL of BMMY media and cultures are grown at about 28-30° C. in a shaker incubator (250 rpm). After 24 hours, a 500 μL aliquot is removed, methanol is added to a final concentration of 0.5% and the cultures are grown at about 28-30° C. in a shaker incubator (250 rpm). A 500 μL aliquot is removed and additional methanol is added to a final concentration of 0.5% to the culture every 24 hours for 3-5 days. Harvested cells are centrifuged (1,500×g at 4° C. for 5 minutes), washed once in water and cell pellets stored at −80° C. until needed. To detect expression of the induced BoNT/A-V5-His, the cell pellets of each time point are lysed using an acid-washed glass bead method. Lysis samples are added to 2× LDS Sample Buffer (Invitrogen, Inc, Carlsbad, Calif.) and expression from established cell lines is measured by Western blot analysis (as described in Examples 6 and 14) using either anti-BoNT/A, anti-V5 or anti-His antibodies in order to identify lines expressing increased amounts of BoNT/A-V5-His produced from SEQ ID NO: 36 relative to established cell lines expressing BoNT/A-V5-His from the SEQ ID NO: 2 control. The P. methanolica Mut^{s} PMAD16 cell line showing the highest expression level of BoNT/A-V5-His relative to the SEQ ID NO: 2 control is selected for large-scale expression using commercial fermentation procedures. Procedures for large-scale expression are as outlined above except the culture volume is approximately 2.5 L BMDY/BMMY media grown in a 5 L BioFlo 3000 fermentor and concentrations of all reagents will be proportionally increased for this volume. For greater details on all procedures described in this example, see P. methanolica Expression Kit, version C, A Manual of Methods for Expression of Recombinant Proteins in Pichia methanolica, 062101, 25-0288 (Invitrogen, Inc, Carlsbad, Calif.).

### Example 19

### Construction and expression of pYES2/BoNT/A-V5-His

[0200] Restriction endonuclease sites suitable for cloning an operably linked nucleic acid molecule into a pYES2 vector (Invitrogen, Inc, Carlsbad, Calif.) are incorporated into the 5′ and 3′ ends of open reading frame SEQ ID NO: 39. This nucleic acid molecule is synthesized and a pUCBHB1/BoNT/A construct is obtained as described in Example 2. This construct is digested with restriction enzymes that 1) excise the insert containing the open reading frame of SEQ ID NO: 39 encoding an active BoNT/A; and 2) enable this insert to be operably-linked to a pYES2 vector. This insert is subcloned using a T4 DNA ligase procedure into a pYES2 vector that is digested with appropriate restriction endonucleases to yield pYES2/BoNT/A-V5-His (FIG. 10). The ligation mixture is transformed into chemically competent E. coli DH5α cells (Invitrogen, Inc, Carlsbad, Calif.) using a heat shock method, plated on 1.5% low salt Luria-Bertani agar plates (pH 7.5) containing 100 μg/mL of Ampicillin, and placed in a 37° C. incubator for overnight growth. Bacteria containing expression constructs are identified as Ampicillin resistant colonies. Candidate constructs are isolated using an alkaline lysis plasmid mini-preparation procedure and analyzed by restriction endonuclease digest mapping to determine the presence and orientation of the insert. This cloning strategy yields a yeast expression construct encoding an active BoNT/A operably linked to carboxyl-terminal V5 and polyhistidine binding peptides. A similar cloning strategy is used to make a pYES2 expression construct containing the unmodifed open reading frame of SEQ ID NO: 2 used as a control for expression levels, as well as, to produce pYES2 expression constructs in which any one of the modified open reading frames of SEQ ID NO: 34 through SEQ ID NO: 38 and SEQ ID NO: 40 through SEQ ID NO: 45 is operably linked to a pYES2 vector.

[0201] To construct a yeast cell line expressing an active BoNT/A, pYES2/BoNT/A-V5-His is transformed into competent S. cerevisiae strain INVSc1 using a Lithium-based transformation method. The transformation mixture is plated on 2% SC minimal media agar plates (pH 7.5) containing 2% glucose, that either have 0.01% uracil or lack uracil and placed in a 28-30° C. incubator for 1-3 days of growth. Selection of transformants containing pYES2/BoNT/A-V5-His is determined by colony growth only on plates containing uracil. A similar strategy is used to make cells containing a pYES2 expression construct containing SEQ ID NO: 2 used as a control for expression levels. Cells containing a pYES2/BoNT/A-V5-His construct are tested for BoNT/A-V5-His expression using a small-scale expression test. Isolated colonies from test cells containing pYES2/BoNT/A-V5-His are used to inoculate 50 mL tubes containing 15 mL of SC media containing 2% glucose and 0.01% uracil and grown overnight at about 28-30° C. in a shaker incubator (250 rpm). The OD₆₀₀ of overnight cultures are determined and aliquoted to obtain a cell concentration of OD₆₀₀ of 0.4 in a 50 mL volume. These aliquots are centrifuged (1,500×g at 22° C. for 5 minutes) and the resulting cell pellet resuspended in SC media containing 20% galactose and 10% raffinose. Cells are grown at about 28-30° C. in a shaker incubator (250 rpm) and 5 mL aliquots are taken at 0 hours, 4 hours, 8 hours, 12 hours, 16 hours and 24 hours and OD₆₀₀ concentrations are determined for each sample. Harvested cells are centrifuged (1,500×g at 4° C. for 5 minutes), washed once in water and cell pellets stored at −80° C. until needed. To detect expression of the induced BoNT/A-V5-His, the cell pellets of each time point are lysed using an acid-washed glass bead method. Lysis samples are added to 2× LDS Sample Buffer (Invitrogen, Inc, Carlsbad, Calif.) and expression from each time point is measured by Western blot analysis (as described in Examples 6 and 14) using either anti-BoNT/A, anti-V5 or anti-His antibodies to identify the optimal induction time necessary to obtain maximal BoNT/A-V5-His expression. The induction conditions resulting in the highest expression level of BoNT/A-V5-His encoded by the modified open reading frame as compared to the unmodified open reading frame of SEQ ID NO: 2 control are selected for large-scale expression using commercial fermentation procedures. Procedures for large-scale expression are as outlined above except the culture volume is approximately 2.5 L SC media grown in a 5 L BioFlo 3000 fermentor and concentrations of all reagents will be proportionally increased for this volume. For greater details on all procedures described in this example, see pYES2/CT, pYES3/CT, and pYC2/CT Yeast Expression Vectors with C-terminal Tags and Auxotrophic Selection Markers, version E, 25-0304, Jan. 27, 2003 (Invitrogen, Inc, Carlsbad, Calif.).

### Example 20

### Construction and Expression of pFastBacHT/His-BoNT/A

[0202] Restriction endonuclease sites suitable for cloning an operably linked nucleic acid molecule into a pFastBacHT vector (Invitrogen, Inc, Carlsbad, Calif.) are incorporated into the 5′- and 3′ ends of modified open reading frame SEQ ID NO: 63. This nucleic acid molecule is synthesized and a pUCBHB1/BoNT/A construct is obtained as described in Example 2. This construct is digested with restriction enzymes that 1) excise the insert containing the open reading frame of SEQ ID NO: 63 encoding an active BoNT/A; and 2) enable this insert to be operably-linked to a pFastBacHT vector. This insert is subcloned using a T4 DNA ligase procedure into a pFastBacHT vector that is digested with appropriate restriction endonucleases to yield pFastBacHT/His-BoNT/A (FIG. 11). The ligation mixture is transformed into chemically competent E. coli DH5α cells (Invitrogen, Inc, Carlsbad, Calif.) using a heat shock method, plated on 1.5% Luria-Bertani agar plates (pH 7.0) containing 100 μg/mL of Ampicillin, and placed in a 37° C. incubator for overnight growth. Bacteria containing expression constructs are identified as Ampicillin resistant colonies. Candidate constructs are isolated using an alkaline lysis plasmid mini-preparation procedure and analyzed by restriction endonuclease digest mapping to determine the presence and orientation of the insert. This cloning strategy yields a baculovirus transfer construct encoding an active BoNT/A operably linked to an amino-terminal, TEV cleavable, polyhistidine affinity binding peptide. A similar cloning strategy is used to make a pFastBacHT construct containing the unmodified open reading frame of SEQ ID NO: 2 used as a control for expression levels, as well as, to produce pFastBacHT expression constructs in which any one of the modified open reading frames of SEQ ID NO: 58, SEQ ID NO: 59, SEQ ID NO: 60, SEQ ID NO: 61 or SEQ ID NO: 62 is operably linked to a pFastBacHT vector.

[0203] To make a bacmid construct expressing an active BoNT/A, pFastBacHT/His-BoNT/A constructs are transformed by a heat shock method into MAX Efficiency® DH10Bac™ E. coli cells for transposition into a bacmid. The transformation mixture is plated on 1.5% Luria-Bertani agar plates (pH 7.0) containing 50 μg/mL of Kanamycin, 7 μg/mL of Gentamicin, 10 μg/mL of Tetracycline, 100 μg/mL of Bluo-gal and 40 μg/mL of IPTG and is grown for approximately 48 hours to isolate recombinant bacmid DNA. Candidate bacmid constructs are isolated as white colonies that are Kanamycin, Gentamicin and Tetracycline resistant. Candidate bacmid constructs are isolated using an alkaline lysis plasmid mini-preparation procedure and analyzed by restriction endonuclease digest mapping to determine the presence and orientation of the insert. A similar strategy is used to generate a recombinant baculoviral stock containing the unmodified open reading frame of SEQ ID NO: 2 construct. A P1 recombinant baculovirus stock is isolated by transfecting approximately 5×10⁵ Sf9 cells plated in a 35 mm tissue culture dish containing 2 mL of complete Sf-900 II SFM media with 50 units/mL of penicillin and 50 μg/mL of streptomycin, with 1.0 mL of transfection solution. The transfection solution is prepared by adding 800 μL of unsupplemented Grace's media to 200 μL of unsupplemented Grace's media, containing 1.0 μg of a purified bacmid His-BoNT/A construct and 6 μL of Cellfectin® Reagent preincubated for 30 minutes to allow formation of DNA:lipid complexes. Cells are incubated with this trasfection solution for 5 hours in a 27° C. incubator, after which time this solution is replaced with 2.0 mL of complete Sf-900 II SFM media with 50 units/mL of penicillin and 50 μg/mL of streptomycin. Sf9 cells are grown for approximately 72 hours in a 27° C. incubator to allow for the release of virus into the medium. The virus is harvested by transferring the media from virally-infected insect cells to 15 mL snap-cap tubes and centrifuging tubes at 500×g for 5 minutes to remove debris. The clarified supernatant is transferred to fresh 15 mL snap-cap tubes and should contain approximately 1×10⁶ to 10⁷ plaque forming units (pfu) of baculovirus. This P1 viral stock is then amplified to generate a P2 recombinant baculovirus stock. About 2×10⁶ Sf9 cells are plated in a 35 mm culture dish containing 2 mL of Sf-900 II SFM media, supplemented with 50 units/mL of penicillin and 50 μg/mL of streptomycin, are inoculated with 400 μL of the P1 recombinant baculovirus stock (approximately 5×10⁶ pfu/ml) and incubated for approximately 48 hours in a 27° C. incubator. The virus is harvested by transferring the media to 15 mL snap-cap tubes and centrifuging tubes at 500×g for 5 minutes to remove debris. The clarified supernatant is transferred to fresh 15 mL snap-cap tubes and should contain approximately 1×10⁷ to 10⁸ pfu of baculovirus.

[0204] To express His-BoNT/A using a baculoviral expression system, about 2×10⁶ Sf9 cells are plated in a 35 mm culture dish containing 2 mL of Sf-900 II SFM media, supplemented with 50 units/mL of penicillin and 50 μg/mL of streptomycin, are inoculated with approximately 4 μL of the P1 recombinant baculovirus stock (approximately 5×10⁷ pfu/ml) and incubated for approximately 48 hours in a 27° C. incubator. Both media and cells are collected for BoNT/A-His expression. Media is harvested by transferring the media to 15 mL snap-cap tubes and centrifuging tubes at 500×g for 5 minutes to remove debris. Cells are harvested by rinsing cells once with 3.0 mL of 100 mM phosphate-buffered saline, pH 7.4 and lysing cells with a buffer containing 62.6 mM 2-amino-2-hydroxymethyl-1,3-propanediol hydrochloric acid (Tris-HCl), pH 6.8 and 2% sodium lauryl sulfate (SDS). Both media and cell samples are added to 2× LDS Sample Buffer (Invitrogen, Inc, Carlsbad, Calif.) and expression is measured by Western blot analysis (as described in Examples 6 and 14) using either anti-BoNT/A or anti-His antibodies in order to identify P2 baculoviral stocks expressing increased amounts of His-BoNT/A produced from SEQ ID NO: 63 relative to stocks expressing His-BoNT/A from the SEQ ID NO: 2 control. For greater details on all procedures described in this example, see Bac-to-Bac® Baculovirus Expression System, version D, An Efficient Site-specific Transposition System to Generate Baculovirus for High-level Expression of Recombinant Proteins, 10359 (Invitrogen, Inc, Carlsbad, Calif.).

### Example 21

### Construction and Expression of pBACgus3/gp64-BoNT/A-His

[0205] Restriction endonuclease sites suitable for cloning an operably linked nucleic acid molecule into a pBACgus3 vector (EMD Biosciences-Novagen, Madison, Wis.) are incorporated into the 5′- and 3′ ends of modified open reading frame SEQ ID NO: 63. This nucleic acid molecule is synthesized and a pUCBHB1/BoNT/A construct is obtained as described in Example 2. This construct is digested with restriction enzymes that 1) excise the insert containing the open reading frame of SEQ ID NO: 63 encoding an active BoNT/A; and 2) enable this insert to be operably-linked to a pBACgus3 vector. This insert is subcloned using a T4 DNA ligase procedure into a pBACgus3 vector that is digested with appropriate restriction endonucleases to yield pBACgus3/BoNT/A-His (FIG. 12). The ligation mixture is transformed into chemically competent E. coli DH5α cells (Invitrogen, Inc, Carlsbad, Calif.) using a heat shock method, plated on 1.5% Luria-Bertani agar plates (pH 7.0) containing 100 μg/mL of Ampicillin, and placed in a 37° C. incubator for overnight growth. Bacteria containing expression constructs are identified as Ampicillin resistant colonies. Candidate constructs are isolated using an alkaline lysis plasmid mini-preparation procedure and analyzed by restriction endonuclease digest mapping to determine the presence and orientation of the insert. This cloning strategy yields a baculovirus transfer construct encoding an active BoNT/A operably linked to an amino-terminal gp64 signal peptide and a carboxyl-terminal, thrombin cleavable, polyhistidine affinity binding peptide. A similar cloning strategy is used to make a pBACgus3 construct containing the unmodified open reading frame of SEQ ID NO: 2 used as a control for expression levels, as well as, to produce pBACgus3 expression constructs in which any one of the modified open reading frames of SEQ ID NO: 58, SEQ ID NO: 59, SEQ ID NO: 60, SEQ ID NO: 61 or SEQ ID NO: 62 is operably linked to a pBACgus3 vector.

[0206] To express BoNT/A-His using a baculoviral expression system, about 2.5×10⁶ Sf9 cells are plated in four 60 mm culture dishes containing 2 mL of BacVector® Insect media (EMD Biosciences-Novagen, Madison, Wis.) and incubated for approximately 20 minutes in a 28° C. incubator. For each transfection, a 50 μL transfection solution is prepared in a 6 mL polystyrene tube by adding 25 μL of BacVector® Insect media containing 100 ng pBACgus3/gp64-BoNT/A-His and 500 ng TlowE transfer plasmid to 25 μL of diluted Insect GeneJuice® containing 5 μL Insect GeneJuice® (EMD Biosciences-Novagen, Madison, Wis.) and 20 μL nuclease-free water and this solution is incubated for approximately 15 minutes. After the 15 minute incubation, add 450 μL BacVector® media to the transfection solution and mix gently. Using this stock transfection solution as the 1/10 dilution make additional transfection solutions of 1/50, 1/250 and 1/1250 dilutions. Add 100 μL of a transfection solution to the Sf9 cells from one of the four 60 mm culture dishes, twice washed with antibiotic-free, serum-free BacVector® Insect media and incubate at 22° C. After one hour, add 6 mL of 1% BacPlaque agarose-BacVector® Insect media containing 5% bovine serum albumin. After the agarose is solidified, add 2 mL BacVector® Insect media containing 5% bovine serum albumin to the transfected cells and transfer the cells to a 28° C. incubator for 3-5 days until plaques are visible. After 3-5 days post-transfection, plaques in the monolayer will be stained for β-glucuronidase reporter gene activity to test for the presence of recombinant virus plaques containing pBACgus3/BoNT/A-His by incubating the washed monolayer with 2 mL of BacVector® Insect media containing 30 μL of 20 mg/mL X-Gluc Solution (EMD Biosciences-Novagen, Madison, Wis.) for approximately 2 hours in a 28° C. incubator.

[0207] After identifying candidate recombinant virus plaques, several candidate virus plaques are eluted and plaque purified. To elute a recombinant virus, transfer a plug containing a recombinant virus plaque with a sterile Pasteur pipet to 1 mL BacVector® Insect media (EMD Biosciences-Novagen, Madison, Wis.) in a sterile screw-cap vial. Incubate the vial for approximately 2 hours at 22° C. or for approximately 16 hours at 4° C. For each recombinant virus plaque, 2.5×10⁵ Sf9 cells are plated in 35 mm culture dishes containing 2 mL of BacVector® Insect media (EMD Biosciences-Novagen, Madison, Wis.) and incubated for approximately 20 minutes in a 28° C. incubator. Remove the media and add 200 μL of eluted recombinant virus. After one hour, add 2 mL of 1% BacPlaque agarose-BacVector® Insect media containing 5% bovine serum albumin. After the agarose is solidified, add 1 mL BacVector® Insect media containing 5% bovine serum albumin to the transfected cells and transfer the cells to a 28° C. incubator for 3-5 days until plaques are visible. After 3-5 days post-transfection, plaques in the monolayer will be stained for β-glucuronidase reporter gene activity to test for the presence of recombinant virus plaques containing pBACgus3/BoNT/A-His by incubating the washed monolayer with 2 mL of BacVector® Insect media containing 30 μL of 20 mg/mL X-Gluc Solution (EMD Biosciences-Novagen, Madison, Wis.) for approximately 2 hours in a 28° C. incubator.

[0208] To prepare a seed stock of virus, elute a recombinant virus by transferring a plug containing a recombinant virus plaque with a sterile Pasteur pipet to 1 mL BacVector® Insect media (EMD Biosciences-Novagen, Madison, Wis.) in a sterile screw-cap vial. Incubate the vial for approximately 16 hours at 4° C. Approximately 5×10⁵ Sf9 cells are plated in T-25 flask containing 5 mL of BacVector® Insect media (EMD Biosciences-Novagen, Madison, Wis.) and are incubated for approximately 20 minutes in a 28° C. incubator. Remove the media and add 300 μL of eluted recombinant virus. After one hour, add 5 mL BacVector® Insect media containing 5% bovine serum albumin to the transfected cells and transfer the cells to a 28° C. incubator for 3-5 days until the majority of cells become unattached and unhealthy. The virus is harvested by transferring the media to 15 mL snap-cap tubes and centrifuging tubes at 1000×g for 5 minutes to remove debris. The clarified supernatant is transferred to fresh 15 mL snap-cap tubes and are stored at 4° C.

[0209] To prepare a high titer stock of virus, approximately 2×10⁷ Sf9 cells are plated in T-75 flask containing 10 mL of BacVector® Insect media (EMD Biosciences-Novagen, Madison, Wis.) and are incubated for approximately 20 minutes in a 28° C. incubator. Remove the media and add 500 μL of virus seed stock. After one hour, add 10 mL BacVector® Insect media containing 5% bovine serum albumin to the transfected cells and transfer the cells to a 28° C. incubator for 3-5 days until the majority of cells become unattached and unhealthy. The virus is harvested by transferring the media to 15 mL snap-cap tubes and centrifuging tubes at 1000×g for 5 minutes to remove debris. The clarified supernatant is transferred to fresh 15 mL snap-cap tubes and are stored at 4° C. High titer virus stocks should contain approximately 2×10⁸ to 3×10⁹ pfu of baculovirus.

[0210] To express gp64-BoNT/A-His using a baculoviral expression system, about 1.25×10⁸ Sf9 cells are seeded in a 1 L flask containing 250 mL of BacVector® Insect media and are grown in an orbital shaker (150 rpm) to a cell density of approximately 5×10⁸. The culture is inoculated with approximately 2.5×10⁹ of high titer stock recombinant baculovirus and incubated for approximately 48 hours in a 28° C. orbital shaker (150 rpm). Media is harvested by transferring the media to tubes and centrifuging tubes at 500×g for 5 minutes to remove debris. Media samples are added to 2× LDS Sample Buffer (Invitrogen, Inc, Carlsbad, Calif.) and expression is measured by Western blot analysis (as described in Examples 6 and 14) using either anti-BoNT/A or anti-His antibodies in order to identify baculoviral stocks expressing increased amounts of His-BoNT/A produced from SEQ ID NO: 63 relative to stocks expressing gp64-BoNT/A-His from the SEQ ID NO: 2 control. For greater details on all procedures described in this example, see BacVector® Transfection Kits, TB216, revision A 1203 (EMD Biosciences-Novagen, Madison, Wis.).

### Example 22

### Construction and Expression of pMT/BiP-BoNT/A-V5-His

[0211] Restriction endonuclease sites suitable for cloning an operably linked nucleic acid molecule into a pMT vector (Invitrogen, Inc, Carlsbad, Calif.) are incorporated into the 5′- and 3′ ends of modified open reading frame SEQ ID NO: 60. This nucleic acid molecule is synthesized and a pUCBHB1/BoNT/A construct obtained as described in Example 2. This construct is digested with restriction enzymes that 1) excise the insert containing the open reading frame of SEQ ID NO: 60 encoding an active BoNT/A; and 2) enable this insert to be operably-linked to a pMT vector. This insert is subcloned using a T4 DNA ligase procedure into a pMT vector that is digested with appropriate restriction endonucleases to yield pMT/BiP-BoNT/A-V5-His (FIG. 13). The ligation mixture is transformed into chemically competent E. coli DH5α cells (Invitrogen, Inc, Carlsbad, Calif.) using a heat shock method, plated on 1.5% Luria-Bertani agar plates (pH 7.0) containing 100 μg/mL of Ampicillin, and placed in a 37° C. incubator for overnight growth. Bacteria containing expression constructs are identified as Ampicillin resistant colonies. Candidate constructs are isolated using an alkaline lysis plasmid mini-preparation procedure and analyzed by restriction endonuclease digest mapping to determine the presence and orientation of the insert. This cloning strategy will yield an insect expression construct encoding an active BoNT/A operably linked to carboxyl-terminal V5 and polyhistidine binding peptides. A similar cloning strategy is used to make a pMT construct containing the unmodified open reading frame of SEQ ID NO: 2 used as a control for expression levels, as well as, to produce pMT expression constructs in which any one of the modified open reading frames of SEQ ID NO: 58, SEQ ID NO: 59, SEQ ID NO: 61, SEQ ID NO: 62 or SEQ ID NO: 63 is operably linked to a pMT vector.

[0212] To transiently express active BoNT/A-V5-His in insect cells, about 3×10⁶ S2 cells are plated in a 35 mm tissue culture dish containing 3 mL of Schneider's Drosophila media and are grown in a 28° C. incubator until cells reach a density of approximately 9×10⁶ cells/ml (6-16 hours). A 600 μL transfection solution is prepared by adding 300 μL of 2× HEPES-Buffered Saline, pH 7.1 (50 mM N-(2-hydroxyethyl)piperazine-N′-(2-ethanesulfonic acid) (HEPES), pH 7.4; 1.5 mM sodium phosphate (monobasic); 280 mM sodium chloride) to 300 μL of 240 mM calcium chloride containing 19 μg of pMT/BiP-BoNT/A-V5-His and this solution is incubated for approximately 30 minutes. The transfection solution is added to S2 cells and the cells are incubated in a 28° C. incubator for approximately 16-24 hours. The transfection media is replaced with 3 mL of fresh Schneider's Drosophila media containing 500 μM copper sulfate to induce expression. Cells are incubated in a 28° C. incubator for an additional 48 hours. Media is harvested by transferring the media to 15 mL snap-cap tubes and centrifuging tubes at 500×g for 5 minutes to remove debris. Samples are added to 2× LDS Sample Buffer (Invitrogen, Inc, Carlsbad, Calif.) and expression is measured by Western blot analysis (as described in Examples 6 and 14) using either anti-BoNT/A, anti-V5 or anti-His antibodies in order to identify pMT constructs expressing increased amounts of BiP-BoNT/A-V5-His produced from SEQ ID NO: 60 relative to constructs expressing BoNT/A-V5-His from the SEQ ID NO: 2 control.

[0213] To generate a stably-integrated insect cell line expressing active BoNT/A-V5-His, approximately 3×10⁶ S2 cells are plated in a 35 mm tissue culture dish containing 3 mL of Schneider's Drosophila media and grown in a 28° C. incubator until cells reach a density of about 9×10⁶ cells/ml (6-16 hours). A 600 μL transfection solution is prepared by adding 300 μL of 2× HEPES-Buffered Saline, pH 7.1 (50 mM N-(2-hydroxyethyl)piperazine-N′-(2-ethanesulfonic acid) (HEPES), pH 7.4; 1.5 mM sodium phosphate (monobasic); 280 mM sodium chloride) to 300 μL of 240 mM calcium chloride containing 19 μg of pMT/BiP-BoNT/A-V5-His and 1 μg of pCoHygro, and this solution is incubated for approximately 30 minutes. The transfection solution is added to S2 cells and incubate in a 28° C. incubator for approximately 16-24 hours. Transfection media is replaced with 3 mL of fresh Schneider's Drosophila media and the cells are incubated in a 28° C. incubator for approximately 48 hours. Media is replaced with 3 mL of fresh Schneider's Drosophila media containing approximately 500 μg/mL of hygromycin-B. Cells are incubated in a 28° C. incubator for approximately 3-4 weeks, and old media is replaced with fresh hygromycin-B selective media every 4 to 5 days. Once hygromycin-B-resistant colonies are established, resistant clones are replated to new 35 mm culture plates containing fresh Schneider's Drosophila media supplemented with approximately 500 μg/mL of hygromycin-B until these cells reach a density of about 6 to 20×10⁶ cells/mL. To test for expression of BoNT/A-V5-His from S2 cell lines that have stably-integrated a pMT/BiP-BoNT/A-V5-His, approximately 3×10⁶ S2 cells from each cell line are plated in a 35 mm tissue culture dish containing 3 mL of Schneider's Drosophila media and are grown in a 28° C. incubator until cells reach a density of about 9×10⁶ cells/ml (6-16 hours). Transfection media is replaced with 3 mL of fresh Schneider's Drosophila media containing 500 μM copper sulfate to induce expression. Cells are incubated in a 28° C. incubator for an additional 48 hours. Media is harvested by transferring the media to 15 mL snap-cap tubes and centrifuging tubes at 500×g for 5 minutes to remove debris. Samples are added to 2× LDS Sample Buffer (Invitrogen, Inc, Carlsbad, Calif.) and expression is measured by Western blot analysis (as described in Examples 6 and 14) using either anti-BoNT/A, anti-V5 or anti-His antibodies in order to identify S2 cell lines expressing increased amounts of BoNT/A-V5-His produced from SEQ ID NO: 60 relative to cell lines expressing BoNT/A-V5-His from the SEQ ID NO: 2 control. The established S2 cell line showing the highest expression level of BoNT/A-V5-His relative to the SEQ ID NO: 2 control is selected for large-scale expression using 3 L spinner flasks. Procedures for large-scale expression are as outlined above except the culture volume is approximately 800-1000 mL of Schneider's Drosophila media and concentrations of all reagents are proportionally increased for this volume. For greater details on all procedures described in this example, see Drosophila Expression System, version H, For the Stable Expression and Purification of Heterologous Proteins in Schneider 2 Cells, 25-0191 (Invitrogen, Inc, Carlsbad, Calif.).

### Example 23

### Construction and Expression of pQBI25/BoNT/A-GFP

[0214] Restriction endonuclease sites suitable for cloning an operably linked nucleic acid molecule into a pQBI25 vector (Qbiogene, Inc., Carlsbad, Calif.) are incorporated into the 5′- and 3′ ends of modified open reading frame SEQ ID NO: 99. This nucleic acid molecule is synthesized and a pUCBHB1/BoNT/A construct is obtained as described in Example 2. This construct is digested with restriction enzymes that 1) excise the insert containing the open reading frame of SEQ ID NO: 99 encoding an active BoNT/A; and 2) enable this insert to be operably-linked to a pQBI25 vector. This insert is subcloned using a T4 DNA ligase procedure into a pQBI25 vector that is digested with appropriate restriction endonucleases to yield pQBI25/BoNT/A-GFP (FIG. 14). The ligation mixture is transformed into chemically competent E. coli DH5α cells (Invitrogen, Inc, Carlsbad, Calif.) using a heat shock method, plated on 1.5% Luria-Bertani agar plates (pH 7.0) containing 100 μg/mL of Ampicillin, and placed in a 37° C. incubator for overnight growth. Bacteria containing expression constructs are identified as Ampicillin resistant colonies. Candidate constructs are isolated using an alkaline lysis plasmid mini-preparation procedure and analyzed by restriction endonuclease digest mapping to determine the presence and orientation of the insert. This cloning strategy yields a mammalian expression construct encoding an active BoNT/A operably linked to carboxyl-terminal GFP peptide. A similar cloning strategy is used to make a pQBI 25 construct containing the unmodified open reading frame of SEQ ID NO: 2 used as a control for expression levels, as well as, to produce pQBI25 expression constructs in which any one of the modified open reading frames of SEQ ID NO: 76 through SEQ ID NO: 98 is operably linked to a pQBI25 vector.

[0215] To transiently express an active BoNT/A-GFP in a cell line, about 1.5×10⁵ SH-SY5Y cells are plated in a 35 mm tissue culture dish containing 3 mL of complete Dulbecco's Modified Eagle Media (DMEM), supplemented with 10% fetal bovine serum (FBS), 1× penicillin/streptomycin solution (Invitrogen, Inc, Carlsbad, Calif.) and 1× MEM non-essential amino acids solution (MEM) (Invitrogen, Inc, Carlsbad, Calif.), and are grown in a 37° C. incubator under 5% carbon dioxide until cells reach a density of about 5×10⁵ cells/mL (6-16 hours). A 500 μL transfection solution is prepared by adding 250 μL of OPTI-MEM Reduced Serum Medium containing 15 μL of LipofectAmine 2000 (Invitrogen, Carlsbad, Calif.) incubated at room temperature for 5 minutes to 250 μL of OPTI-MEM Reduced Serum Medium containing 5 μg of a pQBI25/BoNT/A-GFP. This transfection is incubated at room temperature for approximately 20 minutes. The complete, supplemented DMEM media is replaced with 2 mL of OPTI-MEM Reduced Serum Medium and the 500 μL transfection solution is added to the SH-SY5Y cells and the cells are incubated in a 37° C. incubator under 5% carbon dioxide for approximately 6 to 18 hours. Transfection media is replaced with 3 mL of fresh complete, supplemented DMEM and the cells are incubated in a 37° C. incubator under 5% carbon dioxide for 48 hours. Cells are harvest by rinsing cells once with 3.0 mL of 100 mM phosphate-buffered saline, pH 7.4 and lysing cells with a buffer containing 50 mM N-(2-hydroxyethyl)piperazine-N′-(2-ethanesulfonic acid) (HEPES), pH 6.8 150 mM sodium chloride, 1.5 mM magnesium chloride, 10% (v/v) glycerol, 1 mM ethylene glycol bis(β-aminoethyl ether) N,N,N′,N′-tetraacetic acid (EGTA), 2% (v/v) Triton-X® 100 (4-octylphenol polyethoxylate) and 1× Complete protease inhibitor cocktail (Roche Applied Science, Indianapolis, Ind.). Cell samples are added to 2× LDS Sample Buffer (Invitrogen, Inc, Carlsbad, Calif.) and expression is measured by Western blot analysis (as described in Examples 6 and 14) using either anti-BoNT/A or anti-GFP antibodies in order to identify pQBI 25 constructs expressing increased amounts of BoNT/A-GFP produced from SEQ ID NO: 99 relative to constructs expressing BoNT/A-GFP from the SEQ ID NO: 2 control.

### Example 24

### Construction and Expression of pcDNA™6/BoNT/A-V5-His

[0216] Restriction endonuclease sites suitable for cloning an operably linked nucleic acid molecule into a pcDNA™6 vector (Invitrogen, Inc, Carlsbad, Calif.) are incorporated into the 5′- and 3′ ends of modified open reading frame SEQ ID NO: 99. This nucleic acid molecule is synthesized and a pUCBHB1/BoNT/A construct obtained as described in Example 2. This construct is digested with restriction enzymes that 1) excise the insert containing the open reading frame of SEQ ID NO: 99 encoding an active BoNT/A; and 2) enable this insert to be operably-linked to a pcDNA™6 vector. This insert is subcloned using a T4 DNA ligase procedure into a pcDNA™6 vector that is digested with appropriate restriction endonucleases to yield pcDNA™6/BoNT/A-V5-His (FIG. 15). The ligation mixture is transformed into chemically competent E. coli DH5α cells (Invitrogen, Inc, Carlsbad, Calif.) using a heat shock method, plated on 1.5% Luria-Bertani agar plates (pH 7.0) containing 100 μg/mL of Ampicillin, and placed in a 37° C. incubator for overnight growth. Bacteria containing expression constructs are identified as Ampicillin resistant colonies. Candidate constructs are isolated using an alkaline lysis plasmid mini-preparation procedure and analyzed by restriction endonuclease digest mapping to determine the presence and orientation of the insert. This cloning strategy yields a mammalian expression construct encoding an active BoNT/A operably linked to carboxyl-terminal V5 and polyhistidine binding peptides. A similar cloning strategy is used to make a pcDNA™6 construct containing the unmodified open reading frame of SEQ ID NO: 2 used as a control for expression levels, as well as, to produce pcDNA™6 expression constructs in which any one of the modified open reading frames of SEQ ID NO: 76 through SEQ ID NO: 98 is operably linked to a pcDNA™6 vector.

[0217] To transiently express BoNT/A-V5-His in a cell line, about 1.5×10⁵ SH-SY5Y cells are plated in 35 mm tissue culture dish containing 3 mL of complete Dulbecco's Modified Eagle Media (DMEM), supplemented with 10% fetal bovine serum (FBS), 1× penicillin/streptomycin solution (Invitrogen, Inc, Carlsbad, Calif.) and 1× MEM non-essential amino acids solution (MEM) non-essential amino acids solution (Invitrogen, Inc, Carlsbad, Calif.), and are grown in a 37° C. incubator under 5% carbon dioxide until cells reach a density of about 5×10⁵ cells/ml (6-16 hours). A 500 μL transfection solution is prepared by adding 250 μL of OPTI-MEM Reduced Serum Medium containing 15 μL of LipofectAmine 2000 (Invitrogen, Carlsbad, Calif.) incubated at room temperature for 5 minutes to 250 μL of OPTI-MEM Reduced Serum Medium containing 5 μg of a pcDNA™6/BoNT/A-V5-His. This transfection is incubated at room temperature for approximately 20 minutes. The complete, supplemented DMEM media is replaced with 2 mL of OPTI-MEM Reduced Serum Medium and the 500 μL transfection solution is added to the SH-SY5Y cells and the cells incubated in a 37° C. incubator under 5% carbon dioxide for approximately 6 to 18 hours. Transfection media is replaced with 3 mL of fresh complete, supplemented DMEM and cells are incubated in a 37° C. incubator under 5% carbon dioxide for 48 hours. Both media and cells are collected for expression analysis of BoNT/A-V5-His. Media is harvested by transferring the media to 15 mL snap-cap tubes and centrifuging tubes at 500×x g for 5 minutes to remove debris. Cells are harvested by rinsing cells once with 3.0 mL of 100 mM phosphate-buffered saline, pH 7.4 and the cells are lysed with a buffer containing 62.6 mM 2-amino-2-hydroxymethyl-1,3-propanediol hydrochloric acid (Tris-HCl), pH 6.8 and 2% sodium lauryl sulfate (SDS). Both media and cell samples are added to 2× LDS Sample Buffer (Invitrogen, Inc, Carlsbad, Calif.) and expression is measured by Western blot analysis (as described in Examples 6 and 14) using either anti-BoNT/A, anti-V5 or anti-His antibodies in order to identify pcDNA™6 constructs expressing increased amounts of BoNT/A-V5-His produced from SEQ ID NO: 99 relative to constructs expressing BoNT/A-V5-His from the SEQ ID NO: 2 control.

[0218] To generate a stably-integrated cell line expressing BoNT/A-V5-His, approximately 1.5×10⁵ SH-SY5Y cells are plated in a 35 mm tissue culture dish containing 3 mL of complete DMEM, supplemented with 10% FBS, 1× penicillin/streptomycin solution (Invitrogen, Inc, Carlsbad, Calif.) and 1× MEM non-essential amino acids solution (Invitrogen, Inc, Carlsbad, Calif.), and grown in a 37° C. incubator under 5% carbon dioxide until cells reach a density of about 5×10⁵ cells/ml (6-16 hours). A 500 μL transfection solution is prepared by adding 250 μL of OPTI-MEM Reduced Serum Medium containing 15 μL of LipofectAmine 2000 (Invitrogen, Carlsbad, Calif.) incubated at room temperature for 5 minutes to 250 μL of OPTI-MEM Reduced Serum Medium containing 5 μg of a pcDNA™6/BoNT/A-V5-His. This transfection is incubated at room temperature for approximately 20 minutes. The complete, supplemented DMEM media is replaced with 2 mL of OPTI-MEM Reduced Serum Medium and the 500 μL transfection solution is added to the SH-SY5Y cells and the cells are incubated in a 37° C. incubator under 5% carbon dioxide for approximately 6 to 18 hours. Transfection media is replaced with 3 mL of fresh complete, supplemented DMEM and the cells are incubated in a 37° C. incubator under 5% carbon dioxide for approximately 48 hours. Media is replaced with 3 mL of fresh complete DMEM, containing approximately 5 μg/mL of blasticidin, 10% FBS, 1× penicillin/streptomycin solution (Invitrogen, Inc, Carlsbad, Calif.) and 1× MEM non-essential amino acids solution (Invitrogen, Inc, Carlsbad, Calif.). Cells are incubated in a 37° C. incubator under 5% carbon dioxide for approximately 3-4 weeks, with old media being replaced with fresh blasticidin selective, complete, supplemented DMEM every 4 to 5 days. Once blasticidin-resistant colonies are established, resistant clones are replated to new 35 mm culture plates containing fresh complete DMEM, supplemented with approximately 5 μg/mL of blasticidin, 10% FBS, 1× penicillin/streptomycin solution (Invitrogen, Inc, Carlsbad, Calif.) and 1× MEM non-essential amino acids solution (Invitrogen, Inc, Carlsbad, Calif.), until these cells reach a density of 6 to 20×10⁵ cells/mL. To test for expression of BoNT/A-V5-His from SH-SY5Y cell lines that have stably-integrated a pcDNA™6/BoNT/A-V5-His, approximately 1.5×10⁵ SH-SY5Y cells from each cell line are plated in a 35 mm tissue culture dish containing 3 mL of blasticidin selective, complete, supplemented DMEM and grown in a 37° C. incubator under 5% carbon dioxide until cells reach a density of about 5×10⁵ cells/ml (6-16 hours). Media is replaced with 3 mL of fresh blasticidin selective, complete, supplemented DMEM and cells are incubated in a 37° C. incubator under 5% carbon dioxide for 48 hours. Both media and cells are collected for expression analysis of BoNT/A-V5-His. Media is harvested by transferring the media to 15 mL snap-cap tubes and centrifuging tubes at 500×g for 5 minutes to remove debris. Cells are harvest by rinsing cells once with 3.0 mL of 100 mM phosphate-buffered saline, pH 7.4 and lysing cells with a buffer containing 62.6 mM 2-amino-2-hydroxymethyl-1,3-propanediol hydrochloric acid (Tris-HCl), pH 6.8 and 2% sodium lauryl sulfate (SDS). Both media and cell samples are added to 2× LDS Sample Buffer (Invitrogen, Inc, Carlsbad, Calif.) and expression is measured by Western blot analysis (as described in Examples 6 and 14) using either anti-BoNT/A, anti-V5 or anti-His antibodies in order to identify SH-SY5Y cell lines expressing increased amounts of BoNT/A-V5-His produced from SEQ ID NO: 99 relative to cell lines expressing BoNT/A-V5-His from the SEQ ID NO: 2 control. The established SH-SY5Y cell line showing the highest expression level of BoNT/A-V5-His relative to the SEQ ID NO: 2 control is selected for large-scale expression using 3 L flasks. Procedures for large-scale expression are as outlined above except the starting volume is approximately 800-1000 mL of complete DMEM and concentrations of all reagents are proportionally increased for this volume. For greater details on all procedures described in this example, see pcDNA™6N5-His A, B, and C, version C, 28-0183 (Invitrogen, Inc, Carlsbad, Calif.).

### Example 25

### Construction and Expression of pSecTag2/BoNT/A-c-myc-His

[0219] Restriction endonuclease sites suitable for cloning an operably linked nucleic acid molecule into a pSecTag2 vector (Invitrogen, Inc, Carlsbad, Calif.) are incorporated into the 5′- and 3′ ends of modified open reading frame SEQ ID NO: 99. This nucleic acid molecule is synthesized and a pUCBHB1/BoNT/A construct obtained as described in Example 2. This construct is digested with restriction enzymes that 1) excise the insert containing the open reading frame of SEQ ID NO: 99 encoding an active BoNT/A; and 2) enable this insert to be operably-linked to a pSecTag2 vector. This insert is subcloned using a T4 DNA ligase procedure into a pSecTag2 vector that is digested with appropriate restriction endonucleases to yield pSecTag2/BoNT/A-V5-His (FIG. 16). The ligation mixture is transformed into chemically competent E. coli DH5α cells (Invitrogen, Inc, Carlsbad, Calif.) using a heat shock method, plated on 1.5% Luria-Bertani agar plates (pH 7.0) containing 100 μg/mL of Ampicillin, and placed in a 37° C. incubator for overnight growth. Bacteria containing expression constructs are identified as Ampicillin resistant colonies. Candidate constructs are isolated using an alkaline lysis plasmid mini-preparation procedure and analyzed by restriction endonuclease digest mapping to determine the presence and orientation of the insert. This cloning strategy yields a mammalian expression construct encoding an active BoNT/A operably linked to carboxyl-terminal c-myc and polyhistidine binding peptides. A similar cloning strategy is used to make a pSecTag2 construct containing the unmodified open reading frame of SEQ ID NO: 2 used as a control for expression levels, as well as, to produce pSecTag2 expression constructs in which any one of the modified open reading frames of SEQ ID NO: 76 through SEQ ID NO: 98 is operably linked to a pSecTag2 vector.

[0220] To transiently express BoNT/A-c-myc-His in a cell line, about 1.5×10⁵ SH-SY5Y cells are plated in a 35 mm tissue culture dish containing 3 mL of complete Dulbecco's Modified Eagle Media (DMEM), supplemented with 10% fetal bovine serum (FBS), 1× penicillin/streptomycin solution (Invitrogen, Inc, Carlsbad, Calif.) and 1× MEM non-essential amino acids solution (MEM) non-essential amino acids solution (Invitrogen, Inc, Carlsbad, Calif.), and grown in a 37° C. incubator under 5% carbon dioxide until cells reach a density of about 5×10⁵ cells/ml (6-16 hours). A 500 μL transfection solution is prepared by adding 250 μL of OPTI-MEM Reduced Serum Medium containing 15 μL of LipofectAmine 2000 (Invitrogen, Carlsbad, Calif.) incubated at room temperature for 5 minutes to 250 μL of OPTI-MEM Reduced Serum Medium containing 5 μg of a pSecTag2/BoNT/A-c-myc-His. This transfection is incubated at room temperature for approximately 20 minutes. The complete, supplemented DMEM media is replaced with 2 mL of OPTI-MEM Reduced Serum Medium and the 500 μL transfection solution is added to the SH-SY5Y cells and the cells are incubated in a 37° C. incubator under 5% carbon dioxide for approximately 6 to 18 hours. Transfection media is replaced with 3 mL of fresh complete, supplemented DMEM and the cells are incubated in a 37° C. incubator under 5% carbon dioxide for 48 hours. Both media and cells are collected for expression analysis of BoNT/A-c-myc-His. Media is harvested by transferring the media to 15 mL snap-cap tubes and centrifuging tubes at 500×g for 5 minutes to remove debris. Cells are harvested by rinsing cells once with 3.0 mL of 100 mM phosphate-buffered saline, pH 7.4 and lysing cells with a buffer containing 62.6 mM 2-amino-2-hydroxymethyl-1,3-propanediol hydrochloric acid (Tris-HCl), pH 6.8 and 2% sodium lauryl sulfate (SDS). Both media and cell samples are added to 2× LDS Sample Buffer (Invitrogen, Inc, Carlsbad, Calif.) and expression is measured by Western blot analysis (as described in Examples 6 and 14) using either anti-BoNT/A, anti-c-myc or anti-His antibodies in order to identify pSecTag2 constructs expressing increased amounts of BoNT/A-c-myc-His produced from SEQ ID NO: 99 relative to constructs expressing BoNT/A-V5-His from the SEQ ID NO: 2 control.

[0221] To generate a stably-integrated cell line expressing BoNT/A-V5-His, approximately 1.5×10⁵ SH-SY5Y cells are plated in a 35 mm tissue culture dish containing 3 mL of complete DMEM, supplemented with 10% FBS, 1× penicillin/streptomycin solution (Invitrogen, Inc, Carlsbad, Calif.) and 1× MEM non-essential amino acids solution (invitrogen, Inc, Carlsbad, Calif.), and grown in a 37° C. incubator under 5% carbon dioxide until cells reach a density of about 5×10⁵ cells/ml (6-16 hours). A 500 μL transfection solution is prepared by adding 250 μL of OPTI-MEM Reduced Serum Medium containing 15 μL of LipofectAmine 2000 (Invitrogen, Carlsbad, Calif.) incubated at room temperature for 5 minutes to 250 μL of OPTI-MEM Reduced Serum Medium containing 5 μg of a pSecTag2/BoNT/A-c-myc-His. This transfection is incubated at room temperature for approximately 20 minutes. The complete, supplemented DMEM media is replaced with 2 mL of OPTI-MEM Reduced Serum Medium and the 500 μL transfection solution is added to the SH-SY5Y cells and the cells are incubated in a 37° C. incubator under 5% carbon dioxide for approximately 6 to 18 hours. Transfection media is replaced with 3 mL of fresh complete, supplemented DMEM and cells are incubated in a 37° C. incubator under 5% carbon dioxide for approximately 48 hours. Media is replaced with 3 mL of fresh complete DMEM, containing approximately 5 μg/mL of Zeocin™, 10% FBS, 1× penicillin/streptomycin solution (Invitrogen, Inc, Carlsbad, Calif.) and 1× MEM non-essential amino acids solution (Invitrogen, Inc, Carlsbad, Calif.). Cells are incubated in a 37° C. incubator under 5% carbon dioxide for approximately 3-4 weeks, with old media being replaced with fresh Zeocin™-selective, complete, supplemented DMEM every 4 to 5 days. Once Zeocin™-resistant colonies are established, resistant clones are replated to new 35 mm culture plates containing fresh complete DMEM, supplemented with approximately 5 μg/mL of Zeocin™, 10% FBS, 1× penicillin/streptomycin solution (Invitrogen, Inc, Carlsbad, Calif.) and 1× MEM non-essential amino acids solution (Invitrogen, Inc, Carlsbad, Calif.), until these cells reach a density of 6 to 20×10⁵ cells/mL. To test for expression of BoNT/A-c-myc-His from SH-SY5Y cell lines that have stably-integrated a pSecTag2/BoNT/A-c-myc-His, approximately 1.5×10⁵ SH-SY5Y cells from each cell line are plated in a 35 mm tissue culture dish containing 3 mL of Zeocin™-selective, complete, supplemented DMEM and grown in a 37° C. incubator under 5% carbon dioxide until cells reach a density of about 5×10⁵ cells/ml (6-16 hours). Media is replaced with 3 mL of fresh Zeocin™-selective, complete, supplemented DMEM and cells are incubated in a 37° C. incubator under 5% carbon dioxide for 48 hours. Both media and cells are collected for expression analysis of BoNT/A-c-myc-His. Media is harvested by transferring the media to 15 mL snap-cap tubes and centrifuging tubes at 500×g for 5 minutes to remove debris. Cells are harvest by rinsing cells once with 3.0 mL of 100 mM phosphate-buffered saline, pH 7.4 and lysing cells with a buffer containing 62.6 mM 2-amino-2-hydroxymethyl-1,3-propanediol hydrochloric acid (Tris-HCl), pH 6.8 and 2% sodium lauryl sulfate (SDS). Both media and cell samples are added to 2× LDS Sample Buffer (Invitrogen, Inc, Carlsbad, Calif.) and expression is measured by Western blot analysis (as described in Examples 6 and 14) using either anti-BoNT/A, anti-c-myc or anti-His antibodies in order to identify SH-SY5Y cell lines expressing increased amounts of BoNT/A-c-myc-His produced from SEQ ID NO: 99 relative to cell lines expressing BoNT/A-c-myc-His from the SEQ ID NO: 2 control. The established SH-SY5Y cell line showing the highest expression level of BoNT/A-c-myc-His relative to the SEQ ID NO: 2 control is selected for large-scale expression using 3 L flasks. Procedures for large-scale expression are as outlined above except the starting volume is approximately 800-1000 mL of complete DMEM and concentrations of all reagents are proportionally increased for this volume. For greater details on all procedures described in this example, see pSecTag2 A, B, and C, version E, 28-0159 (Invitrogen, Inc, Carlsbad, Calif.).

### Example 26

### Construction and Expression of pIVEX2.3d/BoNT/A-His

[0222] Restriction endonuclease sites suitable for cloning an operably linked nucleic acid molecule into a pIVEX2.3d vector (Roche Applied Science, Indianapolis, Ind.) are incorporated into the 5′- and 3′ ends of modified open reading frame SEQ ID NO: 3. This nucleic acid molecule is synthesized and a pUCBHB1/BoNT/A construct obtained as described in Example 2. This construct is digested with restriction enzymes that 1) excise the insert containing the open reading frame of SEQ ID NO: 3 encoding an active BoNT/A; and 2) enable this insert to be operably-linked to a pIVEX2.3d vector. This insert is subcloned using a T4 DNA ligase procedure into a pIVEX2.3d vector that is digested with appropriate restriction endonucleases to yield pIVEX2.3d/BoNT/A-His (FIG. 17). The ligation mixture is transformed into chemically competent E. coli DH5α cells (Invitrogen, Inc, Carlsbad, Calif.) using a heat shock method, plated on 1.5% Luria-Bertani agar plates (pH 7.0) containing 100 pg/mL of Ampicillin, and placed in a 37° C. incubator for overnight growth. Bacteria containing expression constructs are identified as Ampicillin resistant colonies. Candidate constructs are isolated using an alkaline lysis plasmid mini-preparation procedure and analyzed by restriction endonuclease digest mapping to determine the presence and orientation of the insert. This cloning strategy yields a prokaryotic expression construct encoding an active BoNT/A operably linked to a carboxyl-terminal polyhistidine binding peptide. A similar cloning strategy is used to make a pIVEX2.3d construct containing the unmodified open reading frame of SEQ ID NO: 2 used as a control for expression levels, as well as, to produce pIVEX2.3d expression constructs in which any one of the modified open reading frames of SEQ ID NO: 4 through SEQ ID NO: 33 is operably linked to a pIVEX2.3d vector.

[0223] The RTS 100 E. coli HY Kit (Roche Applied Science, Indianapolis, Ind.) is used to express an active BoNT/A using a cell-free expression system. A 50 μl reaction mixture consisting of 12 μl E. coli lysate, 10 μl reaction mix, 12 μl amino acids, 1 μl methionine, 5 μl reconstitution buffer and 0.5 μg of pIVEX2.3d/BoNT/A-His is incubated in a 30° C. thermomixer for 4-6 hours. A 5 μl sample from this reaction mixture is added to 2× LDS Sample Buffer (Invitrogen, Inc, Carlsbad, Calif.) and expression is measured by Western blot analysis (as described in Examples 6 and 14) using either anti-BoNT/A or anti-His antibodies in order to identify pIVEX2.3d constructs expressing increased amounts of BoNT/A-His produced from SEQ ID NO: 3 relative to constructs expressing BoNT/A-His from SEQ ID NO: 2. Procedures for large-scale expression are as outlined above except the RTS 9000 E. coli HY Kit (Roche Applied Science, Indianapolis, Ind.) is used. For greater details on all procedures described in this example, see RTS 100 E. coli HY Kit, In vitro protein synthesis system based on E. coli lysate, Instruction Manual, version 3, October 2003 (Roche Applied Science, Indianapolis, Ind.) and Rapid Translation System RTS 9000 E. coli HY Kit, In vitro protein synthesis system based on an enhanced E. coli lysate, Instruction Manual, version 3, November 2001 (Roche Applied Science, Indianapolis, Ind.).

[0224] Although aspects of the present invention have been described with reference to the disclosed embodiments, one skilled in the art will readily appreciate that the specific experiments disclosed are only illustrative of these aspects and in no way limit the present invention. Various modifications can be made without departing from the spirit of the present invention.

What is claimed:

1. A nucleic acid molecule comprising a modified open reading frame encoding an active BoNT/A
wherein the modified open reading frame comprises nucleotide changes that increase the number of synonymous codons preferred by a prokaryotic cell as compared to an unmodified open reading frame encoding the same active BoNT/A; and
wherein the modified open reading frame provides increased expression of the encoded active BoNT/A in the prokaryotic cell.

2. The molecule according to claim 1, wherein the modified open reading frame comprises nucleotide changes that alter at least 100 synonymous codons.

3. The molecule according to claim 1, wherein the modified open reading frame comprises nucleotide changes that alter at least 300 synonymous codons.

4. The molecule according to claim 1, wherein the modified open reading frame comprises nucleotide changes that alter at least 500 synonymous codons.

5. The molecule according to claim 1, wherein the active BoNT/A comprises SEQ ID NO: 1, SEQ ID NO: 111 or SEQ ID NO: 113.

6. The molecule according to claim 1, wherein the prokaryotic cell comprises a Bacteroides fragilis strain, a Bacillus licheniformis strain, a Bacillus subtilis strain, a Caulobacter crescentus strain, a Clostridia difficile strain, a Clostridia perfringens strain, an Escherichia coli strain, a Lactococcus lactis strain, a Methylobacterium extorquens strain, a Pseudomonas fluorescens strain, a Neisseria meningirulls strain or a Salmonella typhimurium strain.

7. The molecule according to claim 1, wherein the prokaryotic cell is a strain of Escherichia coli.

8. The molecule according to claim 1, wherein the increased expression of the active BoNT/A from the modified open reading frame is at least two-fold higher as compared to the expression level of the same active BoNT/A from the unmodified open reading frame.

9. The molecule according to claim 1, wherein the increased expression of the active BoNT/A from the modified open reading frame is at least five-fold higher as compared to the expression level of the same active BoNT/A from the unmodified open reading frame.

10. The molecule according to claim 1, wherein the increased expression of the active BoNT/A from the modified open reading frame is at least ten-fold higher as compared to the expression level of the same active BoNT/A from the unmodified open reading frame.

11. A nucleic acid molecule comprising a modified open reading frame encoding an active BoNT/A
wherein the modified open reading frame comprises nucleotide changes that increase total G+C content to a level preferred by a prokaryotic cell as compared to an unmodified open reading frame encoding the same active BoNT/A; and
wherein the modified open reading frame provides increased expression of the encoded active BoNT/A in the prokaryotic cell as compared to the expression level of the same active BoNT/A in the prokaryotic cell from the unmodified open reading frame in an otherwise identical nucleic acid molecule.

12. The molecule according to claim 11, wherein the modified open reading frame comprises nucleotide changes that increase the total G+C content to at least 30%.

13. The molecule according to claim 11, wherein the modified open reading frame comprises nucleotide changes that increase the total G+C content to at least 40%.

14. The molecule according to claim 11, wherein the modified open reading frame comprises nucleotide changes that increase the total G+C content to at least 50%.

15. The molecule according to claim 11, wherein the active BoNT/A comprises SEQ ID NO: 1, SEQ ID NO: 111 or SEQ ID NO: 113.

16. The molecule according to claim 11, wherein the prokaryotic cell comprises a Bacteroides fragilis strain, a Bacillus licheniformis strain, a Bacillus subtilis strain, a Caulobacter crescentus strain, a Clostridia difficile strain, a Clostridia perfringens strain, an Escherichia coli strain, a Lactococcus lactis strain, a Methylobacterium extorquens strain, a Pseudomonas fluorescens strain, a Neisseria meningirulls strain or a Salmonella typhimurium strain.

17. The molecule according to claim 11, wherein the prokaryotic cell is a strain of Escherichia coli.

18. The molecule according to claim 11, wherein the increased expression of the active BoNT/A from the modified open reading frame is at least two-fold higher as compared to the expression level of the same active BoNT/A from the unmodified open reading frame.

19. The molecule according to claim 11, wherein the increased expression of the active BoNT/A from the modified open reading frame is at least five-fold higher as compared to the expression level of the same active BoNT/A from the unmodified open reading frame.

20. The molecule according to claim 11, wherein the increased expression of the active BoNT/A from the modified open reading frame is at least ten-fold higher as compared to the expression level of the same active BoNT/A from the unmodified open reading frame.

21. A nucleic acid molecule comprising a modified open reading frame comprises SEQ ID NO: 3, SEQ ID NO: 4, SEQ ID NO: 5, SEQ ID NO: 6 SEQ ID NO: 7, SEQ ID NO: 8, SEQ ID NO: 9, SEQ ID NO: 10, SEQ ID NO: 11, SEQ ID NO: 12, SEQ ID NO: 13, SEQ ID NO: 14, SEQ ID NO: 15, SEQ ID NO: 16, SEQ ID NO: 17, SEQ ID NO: 18, SEQ ID NO: 19, SEQ ID NO: 20, SEQ ID NO: 21, SEQ ID NO: 22, SEQ ID NO: 23, SEQ ID NO: 24, SEQ ID NO: 25, SEQ ID NO: 26, SEQ ID NO: 27, SEQ ID NO: 28, SEQ ID NO: 29, SEQ ID NO: 30, SEQ ID NO: 31, SEQ ID NO: 32, SEQ ID NO: 33, SEQ ID NO: 110, SEQ ID NO: 112, SEQ ID NO: 122, SEQ ID NO: 123, SEQ ID NO: 124 or SEQ ID NO: 125.

22. The molecule according to claim 21, wherein the modified open reading frame comprises SEQ ID NO: 3.

23. The molecule according to claim 21, wherein the modified open reading frame comprises SEQ ID NO: 110.

24. The molecule according to claim 21, wherein the modified open reading frame comprises SEQ ID NO: 112.

25. The molecule according to claim 21, wherein the molecule comprises an expression construct.

26. A prokaryotic cell comprising an expression construct, the expression construct comprising
i) a modified open reading frame encoding an active BoNT/A; and
ii) an expression vector;
wherein the modified open reading frame comprises nucleotide changes that increase the number of synonymous codons preferred by the prokaryotic cell as compared to an unmodified open reading frame encoding the same active BoNT/A; and
wherein the modified open reading frame provides increased expression of the encoded active BoNT/A in the prokaryotic cell.

27. The cell according to claim 26, wherein the prokaryotic cell comprises a Bacteroides fragilis strain, a Bacillus licheniformis strain, a Bacillus subtilis strain, a Caulobacter crescentus strain, a Clostridia difficile strain, a Clostridia perfringens strain, an Escherichia coli strain, a Lactococcus lactis strain, a Methylobacterium extorquens strain, a Pseudomonas fluorescens strain, a Neisseria meningirulls strain or a Salmonella typhimurium strain.

28. The cell according to claim 26, wherein the prokaryotic cell is a strain of Escherichia coli.

29. The cell according to claim 26, wherein the expression construct is transiently contained in the prokaryotic cell.

30. The cell according to claim 26, wherein the expression construct is stably contained in the prokaryotic cell.

31. The cell according to claim 26, wherein the modified open reading frame comprises nucleotide changes that alter at least 100 synonymous codons.

32. The cell according to claim 26, wherein the modified open reading frame comprises nucleotide changes that alter at least 300 synonymous codons.

33. The cell according to claim 26, wherein the modified open reading frame comprises nucleotide changes that alter at least 500 synonymous codons.

34. The cell according to claim 26, wherein the active BoNT/A comprises SEQ ID NO: 1, SEQ ID NO: 111 or SEQ ID NO: 113.

35. The cell according to claim 26, wherein the expression vector is a prokaryotic expression vector.

36. The cell according to claim 26, wherein the increased expression of the active BoNT/A from the modified open reading frame is at least two-fold higher as compared to the expression level of the same active BoNT/A from the unmodified open reading frame.

37. The cell according to claim 26, wherein the increased expression of the active BoNT/A from the modified open reading frame is at least five-fold higher as compared to the expression level of the same active BoNT/A from the unmodified open reading frame.

38. The cell according to claim 26, wherein the increased expression of the active BoNT/A from the modified open reading frame is at least ten-fold higher as compared to the expression level of the same active BoNT/A from the unmodified open reading frame.

39. A prokaryotic cell comprising an expression construct, the expression construct comprising
i) a modified open reading frame encoding an active BoNT/A; and
ii) an expression vector;
wherein the modified open reading frame comprises nucleotide changes that increase total G+C content to a level preferred by a prokaryotic cell as compared to an unmodified open reading frame encoding the same active BoNT/A; and
wherein the modified open reading frame provides increased expression of the encoded active BoNT/A in the prokaryotic cell.

40. The cell according to claim 39, wherein the prokaryotic cell comprises a Bacteroides fragilis strain, a Bacillus licheniformis strain, a Bacillus subtilis strain, a Caulobacter crescentus strain, a Clostridia difficile strain, a Clostridia perfringens strain, an Escherichia coli strain, a Lactococcus lactis strain, a Methylobacterium extorquens strain, a Pseudomonas fluorescens strain, a Neisseria meningirulls strain or a Salmonella typhimurium strain.

41. The cell according to claim 39, wherein the prokaryotic cell is a strain of Escherichia coli.

42. The cell according to claim 39, wherein the expression construct is transiently contained in the prokaryotic cell.

43. The cell according to claim 39, wherein the expression construct is stably contained in the prokaryotic cell.

44. The cell according to claim 39, wherein the modified open reading frame comprises nucleotide changes that increase the total G+C content to at least 30%.

45. The cell according to claim 39, wherein the modified open reading frame comprises nucleotide changes that increase the total G+C content to at least 40%.

46. The cell according to claim 39, wherein the modified open reading frame comprises nucleotide changes that increase the total G+C content to at least 50%.

47. The cell according to claim 39, wherein the active BoNT/A comprises SEQ ID NO: 1, SEQ ID NO: 111 or SEQ ID NO: 113.

48. The cell according to claim 39, wherein the expression vector is a prokaryotic expression vector.

49. The cell according to claim 39, wherein the increased expression of the active BoNT/A from the modified open reading frame is at least two-fold higher as compared to the expression level of the same active BoNT/A from the unmodified open reading frame.

50. The cell according to claim 39, wherein the increased expression of the active BoNT/A from the modified open reading frame is at least five-fold higher as compared to the expression level of the same active BoNT/A from the unmodified open reading frame.

51. The cell according to claim 39, wherein the increased expression of the active BoNT/A from the modified open reading frame is at least ten-fold higher as compared to the expression level of the same active BoNT/A from the unmodified open reading frame.

52. A nucleic acid molecule comprising a modified open reading frame encoding an active BoNT/A
wherein the modified open reading frame comprises nucleotide changes that increase the number of synonymous codons preferred by a yeast cell as compared to an unmodified open reading frame encoding the same active BoNT/A; and
wherein the modified open reading frame provides increased expression of the encoded active BoNT/A in the yeast cell.

53. The molecule according to claim 52, wherein the modified open reading frame comprises nucleotide changes that alter at least 100 synonymous codons.

54. The molecule according to claim 52, wherein the modified open reading frame comprises nucleotide changes that alter at least 300 synonymous codons.

55. The molecule according to claim 52, wherein the modified open reading frame comprises nucleotide changes that alter at least 500 synonymous codons.

56. The molecule according to claim 52, wherein the active BoNT/A comprises SEQ ID NO: 1, SEQ ID NO: 111 or SEQ ID NO: 113.

57. The molecule according to claim 52, wherein the yeast cell comprises a Pichia pastoris strain, a Pichia methanolica strain, a Pichia angusta strain, a Schizosaccharomyces pombe strain, a Saccharomyces cerevisiae strain or a Yarrowia lipolytica strain.

58. The molecule according to claim 52, wherein the yeast cell is a strain of Pichia pastoris.

59. The molecule according to claim 52, wherein the increased expression of the active BoNT/A from the modified open reading frame is at least two-fold higher as compared to the expression level of the same active BoNT/A from the unmodified open reading frame.

60. The molecule according to claim 52, wherein the increased expression of the active BoNT/A from the modified open reading frame is at least five-fold higher as compared to the expression level of the same active BoNT/A from the unmodified open reading frame.

61. The molecule according to claim 52, wherein the increased expression of the active BoNT/A from the modified open reading frame is at least ten-fold higher as compared to the expression level of the same active BoNT/A from the unmodified open reading frame.

62. A nucleic acid molecule comprising a modified open reading frame encoding an active BoNT/A
wherein the modified open reading frame comprises nucleotide changes that increase total G+C content to a level preferred by a yeast cell as compared to an unmodified open reading frame encoding the same active BoNT/A; and
wherein the modified open reading frame provides increased expression of the encoded active BoNT/A in the yeast cell.

63. The molecule according to claim 62, wherein the modified open reading frame comprises nucleotide changes that increase the total G+C content to at least 30%.

64. The molecule according to claim 62, wherein the modified open reading frame comprises nucleotide changes that increase the total G+C content to at least 40%.

65. The molecule according to claim 62, wherein the modified open reading frame comprises nucleotide changes that increase the total G+C content to at least 50%.

66. The molecule according to claim 62, wherein the active BoNT/A comprises SEQ ID NO: 1, SEQ ID NO: 111 or SEQ ID NO: 113.

67. The molecule according to claim 62, wherein the yeast cell comprises a Pichia pastoris strain, a Pichia methanolica strain, a Pichia angusta strain, a Schizosaccharomyces pombe strain, a Saccharomyces cerevisiae strain or a Yarrowia lipolytica strain.

68. The molecule according to claim 62, wherein the yeast cell is a strain of Pichia pastoris.

69. The molecule according to claim 62, wherein the increased expression of the active BoNT/A from the modified open reading frame is at least two-fold higher as compared to the expression level of the same active BoNT/A from the unmodified open reading frame.

70. The molecule according to claim 62, wherein the increased expression of the active BoNT/A from the modified open reading frame is at least five-fold higher as compared to the expression level of the same active BoNT/A from the unmodified open reading frame.

71. The molecule according to claim 62, wherein the increased expression of the active BoNT/A from the modified open reading frame is at least ten-fold higher as compared to the expression level of the same active BoNT/A from the unmodified open reading frame.

72. A nucleic acid molecule comprising a modified open reading frame comprises SEQ ID NO: 34, SEQ ID NO: 35, SEQ ID NO: 36, SEQ ID NO: 37 SEQ ID NO: 38, SEQ ID NO: 39, SEQ ID NO: 40, SEQ ID NO: 41, SEQ ID NO: 42, SEQ ID NO: 43, SEQ ID NO: 44 or SEQ ID NO: 45.

73. The molecule according to claim 72, wherein the modified open reading frame comprises SEQ ID NO: 34.

74. The molecule according to claim 72, wherein the modified open reading frame comprises SEQ ID NO: 36.

75. The molecule according to claim 72, wherein the molecule comprises an expression construct.

76. A yeast cell comprising an expression construct, the expression construct comprising
i) a modified open reading frame encoding an active BoNT/A; and
ii) an expression vector;
wherein the modified open reading frame comprises nucleotide changes that increase the number of synonymous codons preferred by the yeast cell as compared to an unmodified open reading frame encoding the same active BoNT/A; and
wherein the modified open reading frame provides increased expression of the encoded active BoNT/A in the yeast cell.

77. The cell according to claim 76, wherein the yeast cell comprises a Pichia pastoris strain, a Pichia methanolica strain, a Pichia angusta strain, a Schizosaccharomyces pombe strain, a Saccharomyces cerevisiae strain or a Yarrowia lipolytica strain.

78. The cell according to claim 76, wherein the yeast cell is a strain of Pichia pastoris.

79. The cell according to claim 76, wherein the expression construct is transiently contained in the yeast cell.

80. The cell according to claim 76, wherein the expression construct is stably contained in the yeast cell.

81. The cell according to claim 76, wherein the modified open reading frame comprises nucleotide changes that alter at least 100 synonymous codons.

82. The cell according to claim 76, wherein the modified open reading frame comprises nucleotide changes that alter at least 300 synonymous codons.

83. The cell according to claim 76, wherein the modified open reading frame comprises nucleotide changes that alter at least 500 synonymous codons.

84. The cell according to claim 76, wherein the active BoNT/A comprises SEQ ID NO: 1, SEQ ID NO: 111 or SEQ ID NO: 113.

85. The cell according to claim 76, wherein the expression vector is a yeast expression vector.

86. The cell according to claim 76, wherein the increased expression of the active BoNT/A from the modified open reading frame is at least two-fold higher as compared to the expression level of the same active BoNT/A from the unmodified open reading frame.

87. The cell according to claim 76, wherein the increased expression of the active BoNT/A from the modified open reading frame is at least five-fold higher as compared to the expression level of the same active BoNT/A from the unmodified open reading frame.

88. The cell according to claim 76, wherein the increased expression of the active BoNT/A from the modified open reading frame is at least ten-fold higher as compared to the expression level of the same active BoNT/A from the unmodified open reading frame.

89. A yeast cell comprising an expression construct, the expression construct comprising
i) a modified open reading frame encoding an active BoNT/A; and
ii) an expression vector;
wherein the modified open reading frame comprises nucleotide changes that increase total G+C content to a level preferred by the yeast cell as compared to an unmodified open reading frame encoding the same active BoNT/A; and
wherein the modified open reading frame provides increased expression of the encoded active BoNT/A in the yeast cell.

90. The cell according to claim 89, wherein the prokaryotic cell comprises a Pichia pastoris strain, a Pichia methanolica strain, a Pichia angusta strain, a Schizosaccharomyces pombe strain, a Saccharomyces cerevisiae strain or a Yarrowia lipolytica strain.

91. The cell according to claim 89, wherein the yeast cell is a strain of Pichia pastoris.

92. The cell according to claim 89, wherein the expression construct is transiently contained in the yeast cell.

93. The cell according to claim 89, wherein the expression construct is stably contained in the yeast cell.

94. The cell according to claim 89, wherein the modified open reading frame comprises nucleotide changes that increase the total G+C content to at least 30%.

95. The cell according to claim 89, wherein the modified open reading frame comprises nucleotide changes that increase the total G+C content to at least 40%.

96. The cell according to claim 89, wherein the modified open reading frame comprises nucleotide changes that increase the total G+C content to at least 50%.

97. The cell according to claim 89, wherein the active BoNT/A comprises SEQ ID NO: 1, SEQ ID NO: 111 or SEQ ID NO: 113.

98. The cell according to claim 89, wherein the expression vector is a yeast expression vector.

99. The cell according to claim 89, wherein the increased expression of the active BoNT/A from the modified open reading frame is at least two-fold higher as compared to the expression level of the same active BoNT/A from the unmodified open reading frame.

100. The cell according to claim 89, wherein the increased expression of the active BoNT/A from the modified open reading frame is at least five-fold higher as compared to the expression level of the same active BoNT/A from the unmodified open reading frame.

101. The cell according to claim 89, wherein the increased expression of the active BoNT/A from the modified open reading frame is at least ten-fold higher as compared to the expression level of the same active BoNT/A from the unmodified open reading frame.

102. A nucleic acid molecule comprising a modified open reading frame encoding an active BoNT/A
wherein the modified open reading frame comprises nucleotide changes that increase the number of synonymous codons preferred by an insect cell as compared to an unmodified open reading frame encoding the same active BoNT/A; and
wherein the modified open reading frame provides increased expression of the encoded active BoNT/A in the insect cell.

103. The molecule according to claim 102, wherein the modified open reading frame comprises nucleotide changes that alter at least 100 synonymous codons.

104. The molecule according to claim 102, wherein the modified open reading frame comprises nucleotide changes that alter at least 300 synonymous codons.

105. The molecule according to claim 102, wherein the modified open reading frame comprises nucleotide changes that alter at least 500 synonymous codons.

106. The molecule according to claim 102, wherein the active BoNT/A comprises SEQ ID NO: 1, SEQ ID NO: 111 or SEQ ID NO: 113.

107. The molecule according to claim 102, wherein the insect cell comprises a Spodoptera frugiperda strain, a Trichoplusia ni strain, a Drosophila melanogaster strain or a Manduca sexta strain.

108. The molecule according to claim 102, wherein the insect cell comprises a Spodoptera frugiperda cell line, a Trichoplusia ni cell line, a Drosophila melanogaster cell line or a Manduca sexta cell line.

109. The molecule according to claim 102, wherein the increased expression of the active BoNT/A from the modified open reading frame is at least two-fold higher as compared to the expression level of the same active BoNT/A from the unmodified open reading frame.

110. The molecule according to claim 102, wherein the increased expression of the active BoNT/A from the modified open reading frame is at least five-fold higher as compared to the expression level of the same active BoNT/A from the unmodified open reading frame.

111. The molecule according to claim 102, wherein the increased expression of the active BoNT/A from the modified open reading frame is at least ten-fold higher as compared to the expression level of the same active BoNT/A from the unmodified open reading frame.

112. A nucleic acid molecule comprising a modified open reading frame encoding an active BoNT/A
wherein the modified open reading frame comprises nucleotide changes that increase total G+C content to a level preferred by an insect cell as compared to an unmodified open reading frame encoding the same active BoNT/A; and
wherein the modified open reading frame provides increased expression of the encoded active BoNT/A in the insect cell.

113. The molecule according to claim 112, wherein the modified open reading frame comprises nucleotide changes that increase the total G+C content to at least 30%.

114. The molecule according to claim 112, wherein the modified open reading frame comprises nucleotide changes that increase the total G+C content to at least 40%.

115. The molecule according to claim 112, wherein the modified open reading frame comprises nucleotide changes that increase the total G+C content to at least 50%.

116. The molecule according to claim 112, wherein the active BoNT/A comprises SEQ ID NO: 1, SEQ ID NO: 111 or SEQ ID NO: 113.

117. The molecule according to claim 112, wherein the insect cell comprises a Spodoptera frugiperda strain, a Trichoplusia ni strain, a Drosophila melanogaster strain or a Manduca sexta strain.

118. The molecule according to claim 112, wherein the insect cell comprises a Spodoptera frugiperda cell line, a Trichoplusia ni cell line, a Drosophila melanogaster cell line or a Manduca sexta cell line.

119. The molecule according to claim 112, wherein the increased expression of the active BoNT/A from the modified open reading frame is at least two-fold higher as compared to the expression level of the same active BoNT/A from the unmodified open reading frame.

120. The molecule according to claim 112, wherein the increased expression of the active BoNT/A from the modified open reading frame is at least five-fold higher as compared to the expression level of the same active BoNT/A from the unmodified open reading frame.

121. The molecule according to claim 112, wherein the increased expression of the active BoNT/A from the modified open reading frame is at least ten-fold higher as compared to the expression level of the same active BoNT/A from the unmodified open reading frame.

122. A nucleic acid molecule comprising a modified open reading frame comprises SEQ ID NO: 58, SEQ ID NO: 59, SEQ ID NO: 60 SEQ ID NO: 61, SEQ ID NO: 62 or SEQ ID NO: 63.

123. The molecule according to claim 122, wherein the modified open reading frame comprises SEQ ID NO: 60.

124. The molecule according to claim 122, wherein the modified open reading frame comprises SEQ ID NO: 63.

125. The molecule according to claim 122, wherein the molecule comprises an expression construct.

126. An insect cell comprising an expression construct, the expression construct comprising
i) a modified open reading frame encoding an active BoNT/A; and
ii) an expression vector;
wherein the modified open reading frame comprises nucleotide changes that increase the number of synonymous codons preferred by the insect cell as compared to an unmodified open reading frame encoding the same active BoNT/A; and
wherein the modified open reading frame provides increased expression of the encoded active BoNT/A in the insect cell.

127. The cell according to claim 126, wherein the insect cell comprises a Spodoptera frugiperda strain, a Trichoplusia ni strain, a Drosophila melanogaster strain or a Manduca sexta strain.

128. The cell according to claim 126, wherein the insect cell comprises a Spodoptera frugiperda cell line, a Trichoplusia ni cell line, a Drosophila melanogaster cell line or a Manduca sexta cell line.

129. The cell according to claim 126, wherein the expression construct is transiently contained in the insect cell.

130. The cell according to claim 126, wherein the expression construct is stably contained in the insect cell.

131. The cell according to claim 126, wherein the modified open reading frame comprises nucleotide changes that alter at least 100 synonymous codons.

132. The cell according to claim 126, wherein the modified open reading frame comprises nucleotide changes that alter at least 300 synonymous codons.

133. The cell according to claim 126, wherein the modified open reading frame comprises nucleotide changes that alter at least 500 synonymous codons.

134. The cell according to claim 126, wherein the active BoNT/A comprises SEQ ID NO: 1, SEQ ID NO: 111 or SEQ ID NO: 113.

135. The cell according to claim 126, wherein the expression vector is an insect expression vector.

136. The cell according to claim 126, wherein the increased expression of the active BoNT/A from the modified open reading frame is at least two-fold higher as compared to the expression level of the same active BoNT/A from the unmodified open reading frame.

137. The cell according to claim 126, wherein the increased expression of the active BoNT/A from the modified open reading frame is at least five-fold higher as compared to the expression level of the same active BoNT/A from the unmodified open reading frame.

138. The cell according to claim 126, wherein the increased expression of the active BoNT/A from the modified open reading frame is at least ten-fold higher as compared to the expression level of the same active BoNT/A from the unmodified open reading frame.

139. An insect cell comprising an expression construct, the expression construct comprising
i) a modified open reading frame encoding an active BoNT/A; and
ii) an expression vector;
wherein the modified open reading frame comprises nucleotide changes that increase total G+C content to a level preferred by the insect cell as compared to an unmodified open reading frame encoding the same active BoNT/A; and
wherein the modified open reading frame provides increased expression of the encoded active BoNT/A in the insect cell.

140. The cell according to claim 139, wherein the insect cell comprises a Spodoptera frugiperda strain, a Trichoplusia ni strain, a Drosophila melanogaster strain or a Manduca sexta strain.

141. The cell according to claim 139, wherein the insect cell comprises a Spodoptera frugiperda cell line, a Trichoplusia ni cell line, a Drosophila melanogaster cell line or a Manduca sexta cell line.

142. The cell according to claim 139, wherein the expression construct is transiently contained in the insect cell.

143. The cell according to claim 139, wherein the expression construct is stably contained in the insect cell.

144. The cell according to claim 139, wherein the modified open reading frame comprises nucleotide changes that increase the total G+C content to at least 30%.

145. The cell according to claim 139, wherein the modified open reading frame comprises nucleotide changes that increase the total G+C content to at least 40%.

146. The cell according to claim 139, wherein the modified open reading frame comprises nucleotide changes that increase the total G+C content to at least 50%.

147. The cell according to claim 139, wherein the active BoNT/A comprises SEQ ID NO: 1, SEQ ID NO: 111 or SEQ ID NO: 113.

148. The cell according to claim 139, wherein the expression vector is an insect expression vector.

149. The cell according to claim 139, wherein the increased expression of the active BoNT/A from the modified open reading frame is at least two-fold higher as compared to the expression level of the same active BoNT/A from the unmodified open reading frame.

150. The cell according to claim 139, wherein the increased expression of the active BoNT/A from the modified open reading frame is at least five-fold higher as compared to the expression level of the same active BoNT/A from the unmodified open reading frame.

151. The cell according to claim 139, wherein the increased expression of the active BoNT/A from the modified open reading frame is at least ten-fold higher as compared to the expression level of the same active BoNT/A from the unmodified open reading frame.

152. A nucleic acid molecule comprising a modified open reading frame encoding an active BoNT/A
wherein the modified open reading frame comprises nucleotide changes that increase the number of synonymous codons preferred by a mammalian cell as compared to an unmodified open reading frame encoding the same active BoNT/A; and
wherein the modified open reading frame provides increased expression of the encoded active BoNT/A in the mammalian cell.

153. The molecule according to claim 152, wherein the modified open reading frame comprises nucleotide changes that alter at least 100 synonymous codons.

154. The molecule according to claim 152, wherein the modified open reading frame comprises nucleotide changes that alter at least 300 synonymous codons.

155. The molecule according to claim 152, wherein the modified open reading frame comprises nucleotide changes that alter at least 500 synonymous codons.

156. The molecule according to claim 152, wherein the active BoNT/A comprises SEQ ID NO: 1, SEQ ID NO: 111 or SEQ ID NO: 113.

157. The molecule according to claim 152, wherein the mammalian cell comprises a mouse cell, a rat cell, a hamster cell, a porcine cell, a bovine cell, an equine cell, a primate cell or a human cell.

158. The molecule according to claim 152, wherein the mammalian cell comprises a mouse cell line, a rat cell line, a hamster cell line, a porcine cell line, a bovine cell line, an equine cell line, a primate cell line or a human cell line.

159. The molecule according to claim 152, wherein the increased expression of the active BoNT/A from the modified open reading frame is at least two-fold higher as compared to the expression level of the same active BoNT/A from the unmodified open reading frame.

160. The molecule according to claim 152, wherein the increased expression of the active BoNT/A from the modified open reading frame is at least five-fold higher as compared to the expression level of the same active BoNT/A from the unmodified open reading frame.

161. The molecule according to claim 152, wherein the increased expression of the active BoNT/A from the modified open reading frame is at least ten-fold higher as compared to the expression level of the same active BoNT/A from the unmodified open reading frame.

162. A nucleic acid molecule comprising a modified open reading frame encoding an active BoNT/A
wherein the modified open reading frame comprises nucleotide changes that increase total G+C content to a level preferred by a mammalian cell as compared to an unmodified open reading frame encoding the same active BoNT/A; and
wherein the modified open reading frame provides increased expression of the encoded active BoNT/A in the mammalian cell.

163. The molecule according to claim 162, wherein the modified open reading frame comprises nucleotide changes that increase the total G+C content to at least 30%.

164. The molecule according to claim 162, wherein the modified open reading frame comprises nucleotide changes that increase the total G+C content to at least 40%.

165. The molecule according to claim 162, wherein the modified open reading frame comprises nucleotide changes that increase the total G+C content to at least 50%.

166. The molecule according to claim 162, wherein the active BoNT/A comprises SEQ ID NO: 1, SEQ ID NO: 111 or SEQ ID NO: 113.

167. The molecule according to claim 162, wherein the mammalian cell comprises a mouse cell, a rat cell, a hamster cell, a porcine cell, a bovine cell, an equine cell, a primate cell or a human cell.

168. The molecule according to claim 162, wherein the mammalian cell comprises a mouse cell line, a rat cell line, a hamster cell line, a porcine cell line, a bovine cell line, an equine cell line, a primate cell line or a human cell line.

169. The molecule according to claim 162, wherein the increased expression of the active BoNT/A from the modified open reading frame is at least two-fold higher as compared to the expression level of the same active BoNT/A from the unmodified open reading frame.

170. The molecule according to claim 162, wherein the increased expression of the active BoNT/A from the modified open reading frame is at least five-fold higher as compared to the expression level of the same active BoNT/A from the unmodified open reading frame.

171. The molecule according to claim 162, wherein the increased expression of the active BoNT/A from the modified open reading frame is at least ten-fold higher as compared to the expression level of the same active BoNT/A from the unmodified open reading frame.

172. A nucleic acid molecule comprising a modified open reading frame comprises SEQ ID NO: 76 SEQ ID NO: 77, SEQ ID NO: 78, SEQ ID NO: 79, SEQ ID NO: 80, SEQ ID NO: 81, SEQ ID NO: 82, SEQ ID NO: 83, SEQ ID NO: 84, SEQ ID NO: 85, SEQ ID NO: 86, SEQ ID NO: 87, SEQ ID NO: 88 SEQ ID NO: 89, SEQ ID NO: 90, SEQ ID NO: 91, SEQ ID NO: 92, SEQ ID NO: 93, SEQ ID NO: 94, SEQ ID NO: 95, SEQ ID NO: 96, SEQ ID NO: 97, SEQ ID NO: 98 or SEQ ID NO: 99.

173. The molecule according to claim 172, wherein the modified open reading frame comprises SEQ ID NO: 78.

174. The molecule according to claim 172, wherein the modified open reading frame comprises SEQ ID NO: 99.

175. The molecule according to claim 172, wherein the molecule comprises an expression construct.

176. A mammalian cell comprising an expression construct, the expression construct comprising
i) a modified open reading frame encoding an active BoNT/A; and
ii) an expression vector;
wherein the modified open reading frame comprises nucleotide changes that increase the number of synonymous codons preferred by the mammalian cell as compared to an unmodified open reading frame encoding the same active BoNT/A; and
wherein the modified open reading frame provides increased expression of the encoded active BoNT/A in the mammalian cell.

177. The cell according to claim 176, wherein the mammalian cell comprises a mouse cell, a rat cell, a hamster cell, a porcine cell, a bovine cell, an equine cell, a primate cell or a human cell.

178. The cell according to claim 176, wherein the mammalian cell comprises a mouse cell line, a rat cell line, a hamster cell line, a porcine cell line, a bovine cell line, an equine cell line, a primate cell line or a human cell line.

179. The cell according to claim 176, wherein the expression construct is transiently contained in the mammalian cell.

180. The cell according to claim 176, wherein the expression construct is stably contained in the mammalian cell.

181. The cell according to claim 176, wherein the modified open reading frame comprises nucleotide changes that alter at least 100 synonymous codons.

182. The cell according to claim 176, wherein the modified open reading frame comprises nucleotide changes that alter at least 300 synonymous codons.

183. The cell according to claim 176, wherein the modified open reading frame comprises nucleotide changes that alter at least 500 synonymous codons.

184. The cell according to claim 176, wherein the active BoNT/A comprises SEQ ID NO: 1, SEQ ID NO: 111 or SEQ ID NO: 113.

185. The cell according to claim 176, wherein the expression vector is a mammalian expression vector.

186. The cell according to claim 176, wherein the increased expression of the active BoNT/A from the modified open reading frame is at least two-fold higher as compared to the expression level of the same active BoNT/A from the unmodified open reading frame.

187. The cell according to claim 176, wherein the increased expression of the active BoNT/A from the modified open reading frame is at least five-fold higher as compared to the expression level of the same active BoNT/A from the unmodified open reading frame.

188. The cell according to claim 176, wherein the increased expression of the active BoNT/A from the modified open reading frame is at least ten-fold higher as compared to the expression level of the same active BoNT/A from the unmodified open reading frame.

189. A mammalian cell comprising an expression construct, the expression construct comprising
i) a modified open reading frame encoding an active BoNT/A; and
ii) an expression vector;
wherein the modified open reading frame comprises nucleotide changes that increase total G+C content to a level preferred by the mammalian cell as compared to an unmodified open reading frame encoding the same active BoNT/A; and
wherein the modified open reading frame provides increased expression of the encoded active BoNT/A in the mammalian cell.

190. The cell according to claim 189, wherein the mammalian cell comprises a mouse cell, a rat cell, a hamster cell, a porcine cell, a bovine cell, an equine cell, a primate cell or a human cell.

191. The cell according to claim 189, wherein the mammalian cell comprises a mouse cell line, a rat cell line, a hamster cell line, a porcine cell line, a bovine cell line, an equine cell line, a primate cell line or a human cell line.

192. The cell according to claim 189, wherein the expression construct is transiently contained in the mammalian cell.

193. The cell according to claim 189, wherein the expression construct is stably contained in the mammalian cell.

194. The cell according to claim 189, wherein the modified open reading frame comprises nucleotide changes that increase the total G+C content to at least 30%.

195. The cell according to claim 189, wherein the modified open reading frame comprises nucleotide changes that increase the total G+C content to at least 40%.

196. The cell according to claim 189, wherein the modified open reading frame comprises nucleotide changes that increase the total G+C content to at least 50%.

197. The cell according to claim 189, wherein the active BoNT/A comprises SEQ ID NO: 1, SEQ ID NO: 111 or SEQ ID NO: 113.

198. The cell according to claim 189, wherein the expression vector is a mammalian expression vector.

199. The cell according to claim 189, wherein the increased expression of the active BoNT/A from the modified open reading frame is at least two-fold higher as compared to the expression level of the same active BoNT/A from the unmodified open reading frame.

200. The cell according to claim 189, wherein the increased expression of the active BoNT/A from the modified open reading frame is at least five-fold higher as compared to the expression level of the same active BoNT/A from the unmodified open reading frame.

201. The cell according to claim 189, wherein the increased expression of the active BoNT/A from the modified open reading frame is at least ten-fold higher as compared to the expression level of the same active BoNT/A from the unmodified open reading frame.

The application's sequence listing, which the Patent Office published only in electronic form, follows.

SEQUENCE LISTING (125 sequences)

SEQ ID NO: 1 - protein, 1296 aa, Clostridium botulinum
  DOMAIN (1)...(448): Light chain, therapeutic domain, catalytic domain, enzymatic domain.
  DOMAIN (449)...(1296): Heavy chain
  DOMAIN (449)...(860): Amino-terminal half of the heavy chain, translocation domain
  DOMAIN (861)...(1296): Carboxy-terminal half of the heavy chain, targeting domain, binding domain, cell binding domain
  PEPTIDE (1)...(1296): BoNT/A, active
MPFVNKQFNYKDPVNGVDIAYIKIPNAGQMQPVKAFKIHNKIWVIPERDTFTNPEEGDLNPPPEAKQVPVSYYDSTYLSTDNEKDNYLKGVTKLFERIYSTDLGRMLLTSIVRGIPFWGGSTIDTELKVIDTNCINVIQPDGSYRSEELNLVIIGPSADIIQFECKSFGHEVLNLTRNGYGSTQYIRFSPDFTFGFEESLEVDTNPLLGAGKFATDPAVTLAHELIHAGHRLYGIAINPNRVFKVNTNAYYEMSGLEVSFEELRTFGGHDAKFIDSLQENEFRLYYYNKFKDIASTLNKAKSIVGTTASLQYMKNVFKEKYLLSEDTSGKFSVDKLKFDKLYKMLTEIYTEDNFVKFFKVLNRKTYLNFDKAVFKINIVPKVNYTIYDGFNLRNTNLAANFNGQNTEINNMNFTKLKNFTGLFEFYKLLCVRGIITSKTKSLDKGYNKALNDLCIKVNNWDLFFSPSEDNFTNDLNKGEEITSDTNIEAAEENISLDLIQQYYLTFNFDNEPENISIENLSSDIIGQLELMPNIERFPNGKKYELDKYTMFHYLRAQEFEHGKSRIALTNSVNEALLNPSRVYTFFSSDYVKKVNKATEAAMFLGWVEQLVYDFTDETSEVSTTDKIADITIIIPYIGPALNIGNMLYKDDFVGALIFSGAVILLEFIPEIAIPVLGTFALVSYIANKVLTVQTIDNALSKRNEKWDEVYKYIVTNWLAKVNTQIDLIRKKMKEALENQAEATKAIINYQYNQYTEEEKNNINFNIDDLSSKLNESINKAMININKFLNQCSVSYLMNSMIPYGVKRLEDFDASLKDALLKYIYDNRGTLIGQVDRLKDKVNNTLSTDIPFQLSKYVDNQRLLSTFTEYIKNIINTSILNLRYESNHLIDLSRYASKINIGSKVNFDPIDKNQIQLFNLESSKIEVILKNAIVYNSMYENFSTSFWIRIPKYFNSISLNNEYTIINCMENNSGWKVSLNYGEIIWTLQDTQEIKQRVVFKYSQMINISDYINRWIFVTITNNRLNNSKIYINGRLIDQKPISNLGNIHASNNIMFKLDGCRDTHRYIWIKYFNLFDKELNEKEIKDLYDNQSNSGILKDFWGDYLQYDKPYYMLNLYDPNKYVDVNNVGIRGYMYLKGPRGSVMTTNIYLNSSLYRGTKFIIKKYASGNKDNIVRNNDRVYINVVVKNKEYRLATNASQAGVEKILSALEIPDVGNLSQVVVMKSKNDQGITNKCKMNLQDNNGNDIGFIGFHQFNNIAKLVASNWYNRQIERSSRTLGCSWEFIPVDDGWGERPL

SEQ ID NO: 2 - DNA, 3891 bp, Clostridium botulinum
  CDS (1)...(3891): BoNT/A, unmodified
atgccatttgttaataaacaatttaattataaagatcctgtaaatggtgttgatattgcttatataaaaattccaaatgcaggacaaatgcaaccagtaaaagcttttaaaattcataataaaatatgggttattccagaaagagatacatttacaaatcctgaagaaggagatttaaatccaccaccagaagcaaaacaagttccagtttcatattatgattcaacatatttaagtacagataatgaaaaagataattatttaaagggagttacaaaattatttgagagaatttattcaactgatcttggaagaatgttgttaacatcaatagtaaggggaataccattttggggtggaagtacaatagatacagaattaaaagttattgatactaattgtattaatgtgatacaaccagatggtagttatagatcagaagaacttaatctagtaataataggaccctcagctgatattatacagtttgaatgtaaaagctttggacatgaagttttgaatcttacgcgaaatggttatggctctactcaatacattagatttagcccagattttacatttggttttgaggagtcacttgaagttgatacaaatcctcttttaggtgcaggcaaatttgctacagatccagcagtaacattagcacatgaacttatacatgctggacatagattatatggaatagcaattaatccaaatagggtttttaaagtaaatactaatgcctattatgaaatgagtgggttagaagtaagctttgaggaacttagaacatttgggggacatgatgcaaagtttatagatagtttacaggaaaacgaatttcgtctatattattataataagtttaaagatatagcaagtacacttaataaagctaaatcaatagtaggtactactgcttcattacagtatatgaaaaatgtttttaaagagaaatatctcctatctgaagatacatctggaaaattttcggtagataaattaaaatttgataagttatacaaaatgttaacagagatttacacagaggataattttgttaagttttttaaagtacttaacagaaaaacatatttgaattttgataaagccgtatttaagataaatatagtacctaaggtaaattacacaatatatgatggatttaatttaagaaatacaaatttagcagcaaactttaatggtcaaaatacagaaattaataatatgaattttactaaactaaaaaattttactggattgtttgaattttataagttgctatgtgtaagagggataataacttctaaaactaaatcattagataaaggatacaataaggcattaaatgatttatgtatcaaagttaataattgggacttgttttttagtccttcagaagataattttactaatgatctaaataaaggagaagaaattacatctgatactaatatagaagcagcagaagaaaatattagtttagatttaatacaacaatattatttaacctttaattttgataatgaacctgaaaatatttcaatagaaaatctttcaagtgacattataggccaattagaacttatgcctaatatagaaagatttcctaatggaaaaaagtatgagttagataaatatactatgttccattatcttcgtgctcaagaatttgaacatggtaaatctaggattgctttaacaaattctgttaacgaagcattattaaatcctagtcgtgtttatacatttttttcttcagactatgtaaagaaagttaataaagctacggaggcagctatgtttttaggctgggtagaacaattagtatatgattttaccgatgaaactagcgaagtaagtactacggataaaattgcggatataactataattattccatatataggacctgctttaaatataggtaatatgttatataaagatgattttgtaggtgctttaatattttcaggagctgttattctgttagaatttataccagagattgcaatacctgtattaggtacttttgcacttgtatcatatattgcgaataaggttctaaccgttcaaacaatagataatgctttaagtaaaagaaatgaaaaatgggatgaggtctataaatatatagtaacaaattggttagcaaaggttaatacacagattgatctaataagaaaaaaaatgaaagaagctttagaaaatcaagcagaagcaacaaaggctataataaactatcagtataatcaatatactgaggaagagaaaaataatattaattttaatattgatgatttaagttcgaaacttaatgagtctataaataaagctatgattaatataaataaatttttgaatcaatgctctgtttcatatttaatgaattctatgatcccttatggtgttaaacggttagaagattttgatgctagtcttaaagatgcattattaaagtatatatatgataatagaggaactttaattggtcaagtagatagattaaaagataaagttaataatacacttagtacagatataccttttcagctttccaaatacgtagataatcaaagattattatctacatttactgaatatattaagaatattattaatacttctatattgaatttaagatatgaaagtaatcatttaatagacttatctaggtatgcatcaaaaataaatattggtagtaaagtaaattttgatccaatagataaaaatcaaattcaattatttaatttagaaagtagtaaaattgaggtaattttaaaaaatgctattgtatataatagtatgtatgaaaattttagtactagcttttggataagaattcctaagtattttaacagtataagtctaaataatgaatatacaataataaattgtatggaaaataattcaggatggaaagtatcacttaattatggtgaaataatctggactttacaggatactcaggaaataaaacaaagagtagtttttaaatacagtcaaatgattaatatatcagattatataaacagatggatttttgtaactatcactaataatagattaaataactctaaaatttatataaatggaagattaatagatcaaaaaccaatttcaaatttaggtaatattcatgctagtaataatataatgtttaaattagatggttgtagagatacacatagatatatttggataaaatattttaatctttttgataaggaattaaatgaaaaagaaatcaaagatttatatgataatcaatcaaattcaggtattttaaaagacttttggggtgattatttacaatatgataaaccatactatatgttaaatttatatgatccaaataaatatgtcgatgtaaataatgtaggtattagaggttatatgtatcttaaagggcctagaggtagcgtaatgactacaaacatttatttaaattcaagtttgtatagggggacaaaatttattataaaaaaatatgcttctggaaataaagataatattgttagaaataatgatcgtgtatatattaatgtagtagttaaaaataaagaatataggttagctactaatgcgtcacaggcaggcgtagaaaaaatactaagtgcattagaaatacctgatgtaggaaatctaagtcaagtagtagtaatgaagtcaaaaaatgatcaaggaataacaaataaatgcaaaatgaatttacaagataataatgggaatgatataggctttataggatttcatcagtttaataatatagctaaactagtagcaagtaattggtataatagacaaatagaaagatctagtaggactttgggttgctcatgggaatttattcctgtagatgatggatggggagaaaggccactgtaa

SEQ ID NO: 3 - DNA, 3891 bp, Artificial Sequence
  BoNT/A, E. coli-modified 1
atgccgttcgtaaacaaacagttcaactataaagacccagtcaacggcgtggacattgcctatatcaaaatcccgaatgcgggtcaaatgcagcccgtgaaagcatttaaaatccataacaaaatttgggtgatcccggagcgcgatacgttcacgaacccggaagaaggagatttaaacccaccgcctgaggctaaacaggtcccggtgtcttactatgatagcacatacctgagtaccgacaatgaaaaggacaactacctgaaaggtgttaccaaactgttcgagcgcatttattcgacagatctcggtcgcatgttgctgacttctattgtgcgcggcattccgttttggggtggtagcaccatcgatacagaactcaaagtgattgacaccaactgcatcaatgtgattcagcctgatgggagctaccggtccgaagagcttaacctcgtaatcattggcccgagcgcggatattatccaattcgaatgtaaatcttttgggcatgaagtcctgaatctgacgcggaatggctatggatcgacgcagtatattcgtttttctccagatttcacatttggatttgaagaaagcctcgaagttgatacgaaccctcttttaggcgcgggaaaattcgcgacggacccagcggtgaccttggcacatgaacttattcatgccgggcatcgcttgtatggaatcgccattaacccgaaccgtgttttcaaggtgaatacgaacgcgtattacgagatgtcgggcttagaagtgtcctttgaagaactgcgcacgtttggcggtcatgatgcaaaatttattgatagtctgcaagaaaacgaatttcggctgtactattacaataaattcaaagacattgcatcaaccttaaacaaggcgaaaagcattgtgggtaccacggctagcttacaatatatgaaaaacgttttcaaagaaaaatacctccttagcgaagacacttccggcaaattctctgtcgataaactgaaatttgataaactgtataaaatgctcaccgagatctacacagaggataactttgtcaaattcttcaaggtcttgaatcggaaaacctatctgaacttcgataaagccgtctttaagatcaacatcgtaccgaaagttaactacaccatctatgatggctttaatctgcgcaatacgaatctggcggcgaactttaacggccagaacaccgaaatcaacaacatgaactttactaaactgaaaaattttaccggcttgtttgaattttataagctcctgtgtgtccgcggtattatcaccagcaaaaccaaatccttggataagggctataacaaggcgctcaatgatttatgcatcaaggtgaacaactgggacttgtttttctctccatctgaagataattttactaacgacttgaacaaaggagaggaaattacttccgataccaacatcgaagcagcggaagagaatattagcctggatcttattcaacaatattacctgacctttaattttgataacgagcctgagaacatttccattgagaatctcagctctgacatcatcggccagctggaactgatgccgaatatcgaacgctttcctaatggaaagaaatatgaattggacaaatacaccatgttccactatctccgcgcgcaggagtttgagcacggcaagtctcgtattgctctgaccaattcggtaaacgaagcccttttaaatccttcgcgtgtgtacacctttttctcaagcgattatgttaaaaaagtgaacaaggcgaccgaagcggcgatgtttttgggatgggtggaacaactggtatatgactttacggatgaaacttctgaagtctcgaccaccgacaaaattgccgatattaccattatcattccctatattggccctgcactgaacattggtaacatgctgtataaagatgattttgtgggcgccctgatcttttcaggcgctgttatcctgctggaatttatcccggaaatcgccattccagtactcggtacctttgcgctggtgtcctatatcgcaaacaaagttttgactgtccagacgatcgacaacgcgctcagtaaacgtaacgaaaaatgggatgaggtgtataagtatattgttaccaactggctcgctaaagtaaacacccagattgacctgattcgcaagaagatgaaagaagcgctggaaaaccaagcagaagcgaccaaagctattatcaactatcaatataaccagtacacagaggaagaaaagaataacatcaacttcaacatcgacgacttatcttcaaagctgaatgaatctattaacaaagcgatgattaatattaacaagttcttgaaccaatgtagtgtcagctatctgatgaactcgatgatcccatatggtgtgaaacgtctggaagacttcgatgcaagccttaaagatgcccttctgaagtatatttacgataatcgcggaactcttattggccaagtggatcgcttaaaagataaagtcaacaacacgctgagtacagacatcccttttcagctgtctaaatatgtggacaatcagcgcctgctgtccacgtttacggaatacatcaaaaacatcatcaacactagtattctgaacttgcgttacgagagtaaccatctgattgatctgagccgttacgcatctaaaatcaacatcggctcgaaggtgaacttcgatcctatcgacaaaaaccagattcaattgttcaacttagaatcgtcaaagattgaagttatcttaaaaaatgcgattgtatataattcaatgtacgaaaatttctctacgagcttttggattcgtattccgaaatatttcaacagtatctctttaaacaacgagtatactatcatcaattgtatggagaataacagcgggtggaaagtgagccttaactatggtgaaatcatctggactctgcaggacactcaagaaattaaacaacgcgtggtgtttaaatactcacagatgattaacatctcggattatattaatcgctggatttttgtgacaattactaacaaccggctgaacaacagcaaaatttacattaacggtcgcctgatcgatcagaaaccaatcagtaatctcggtaacattcacgcatcgaataatatcatgttcaaactggatggttgtcgcgacacgcaccgttacatttggatcaaatacttcaatttattcgacaaagaactcaacgaaaaggagattaaggatctttatgacaatcagtctaattcgggtattctgaaagacttttggggtgattaccttcagtacgataaaccgtattatatgttaaacttatatgatccgaataaatacgttgacgtcaacaacgttggcattcgtggctatatgtatctgaaagggccgcgtggcagcgtgatgaccactaacatttacttaaactcctccctctatcgcggtactaaatttattatcaagaaatatgcctctggcaacaaggacaatatcgtacgcaataacgatcgcgtctacattaacgtggtggtgaagaataaagaatatcgtctggcgaccaatgctagtcaggcgggcgtggagaaaattctgtctgcacttgaaatcccggatgtgggtaatttatcccaggtggttgtgatgaaaagtaaaaatgaccaagggatcaccaataaatgcaaaatgaatctgcaagataacaacggcaacgacattggttttatcggcttccaccaattcaataatatcgcgaaactggtggcctcaaattggtacaaccgtcagattgagcgcagctcccgcactttaggctgtagctgggagttcattccggtagatgacggttggggagaacgcccattgtaa

SEQ ID NO: 4 - DNA, 3891 bp, Artificial Sequence
  BoNT/A, E. coli-modified 2
atgccgttcgtgaacaaacagtttaactataaagaccctgtcaatggggttgatatagcgtatattaaaattccgaatgcgggacagatgcagccagtgaaagctttcaagatacacaataaaatttgggtcattccggaacgtgacacatttaccaacccagaggaaggggatttgaaccccccaccggaggcgaaacaggttcctgtttcgtactatgattcaacatacctgagtaccgataacgaaaaggacaactatcttaaaggcgtaacgaagctttttgaacgcatctactccacagatctcggacgtatgttgctgacctctattgtgcgcggcattccgttttggggcggatccaccatagataccgaattaaaagttattgatacaaattgtatcaatgtcatccaacctgatggcagttaccgcagcgaagagctaaatcttgtaattatcggcccgagtgctgacataatccagttcgaatgcaagagctttggtcatgaggtgttgaacctgactcgtaacgggtatgggtctactcaatacattcgcttcagcccggacttcacctttggttttgaggaatctctcgaagttgatacgaatccgctgcttggtgctggaaagtttgccactgaccccgccgtgacactcgcgcatgagctgattcacgccggtcatcgtctgtacggtatcgcaatcaaccctaaccgcgtgttcaaagttaacactaatgcgtattacgaaatgtccgggctggaagttagtttcgaagagctgcggaccttcggtggccatgatgcgaagtttattgattcgctgcaagaaaatgaatttcgcttgtattactataacaagtttaaagatatcgcatcaacccttaacaaagccaaaagcattgtcggcacgaccgcatcgctacaatacatgaaaaatgtcttcaaagaaaaatatctgttatccgaggatacctccggtaaattctcagtggacaaacttaaattcgataagctgtataaaatgctaacggagatctatacggaagataactttgtaaagtttttcaaagtcttaaatcgcaaaacgtatctgaattttgacaaagctgtcttcaaaattaatattgttcccaaagttaactatacgatttacgacggattcaacttaagaaacactaaccttgccgcgaatttcaacgggcagaacacggaaattaataacatgaattttacgaaattaaagaactttaccgggctgtttgagttttacaaattgctctgcgtgcgcggaatcattaccagcaaaacgaaatcactggataaaggttataataaagcgcttaacgatctgtgcattaaagttaacaattgggatttattcttttcaccatctgaggataactttacaaacgatctcaacaaaggcgaggaaattacaagtgatactaatattgaggcagcggaagagaatatttcactggatctgatccagcaatactatttgacctttaacttcgataatgaacccgaaaatatcagtattgaaaatttgagctcagacatcattggacagctggaactgatgccaaatatcgagcgtttcccaaacggtaaaaagtatgaactggacaaatacaccatgtttcactatctgcgcgctcaagagttcgagcatggcaagtctaggatcgcgttgactaattcggtgaatgaggcactgttaaaccctagtcgggtgtatacattcttttcctctgattatgttaaaaaggtcaacaaagccacggaagccgcaatgttcctgggctgggtcgaacagttagtgtatgattttaccgacgaaacttccgaggtttcaaccacagacaaaattgcggatattaccattataatcccgtacatcggcccggctttaaacattggtaatatgttgtacaaagatgactttgtgggtgccctgatattttccggtgcagtaattttgctcgagtttatcccagaaatagcaatccccgttttaggtacgttcgctttagtgagctatattgcaaacaaagttctgactgtacaaacgattgataatgccctgtcgaaacgtaatgaaaagtgggatgaggtttataagtatatcgttaccaactggctggccaaggtaaatacacagatcgatctgattcggaaaaagatgaaagaagcgctggaaaatcaggcggaagctactaaagcaatcataaactatcaatataatcagtataccgaagaggaaaaaaacaatatcaattttaatattgacgatctgagcagtaaactgaatgaatcgatcaataaggctatgattaacataaacaagtttctgaaccaatgctcagtctcttatttaatgaactcaatgattccgtacggcgtaaaaagattggaagactttgatgccagcctgaaagacgccttacttaaatatatctacgataatcgtggtaccctgattggtcaggtcgaccgactgaaagataaggtgaataacacgctctcaaccgatattccgtttcagttatccaaatatgtggataatcagcgcttgctgagtacattcaccgagtatattaagaacattataaatacctccatcctgaatctgcgttacgaatcgaaccatctaatcgacctgagccgttacgcgtctaaaataaatatcggctctaaagttaattttgatccaattgataaaaatcagatccagttattcaatctggagtctagcaagattgaagtcattctgaagaatgcgattgtgtataactcaatgtacgaaaactttagcacatcgttttggattcggatcccgaaatatttcaatagcatttcgctgaacaatgaatatacgataatcaactgtatggaaaataacagtggctggaaagtaagtctgaattacggcgaaattatatggaccctccaagacacgcaggaaatcaaacagcgtgtcgtatttaaatattcccagatgattaatattagcgattacattaatcgctggatctttgttaccattactaacaatcgcctcaataactctaaaatttatatcaatggtcgcttgatagatcagaaacctatcagcaatctcggcaatatccacgcgtctaataacattatgtttaaacttgatggttgtagggatacccacagatacatatggattaaatactttaacctgtttgacaaggagttgaatgaaaaggaaatcaaagacctgtatgataatcagagcaatagcgggattctgaaagacttctggggagattaccttcagtatgataagccgtactatatgcttaatctctatgacccgaacaaatacgttgatgtaaacaatgtggggatccgtggttatatgtacctgaagggcccgcgtggaagtgtaatgactacgaacatctacctgaattccagtttatatcgaggcaccaaattcatcataaaaaagtatgcgagcggtaacaaagacaatattgtacgaaataacgacagagtgtatattaacgttgtggtcaaaaataaagaatatcgtttagctacaaatgccagccaggcaggcgtggaaaaaatcctgagtgcacttgaaatcccggatgtgggcaatctgtcgcaggtggttgtgatgaaatctaaaaatgatcaagggattactaacaaatgtaaaatgaacctgcaggataacaatggcaacgatatcggctttatcggtttccatcaattcaacaacattgccaaacttgtcgcatcaaactggtataaccgtcaaattgaacggtcttcgcgcactctaggttgcagctgggaatttatccctgtggacgacggctggggtgaacgtccgctgtaa

SEQ ID NO: 5 - DNA, 3891 bp, Artificial Sequence
  BoNT/A, E. coli-modified 3
atgccgtttgtgaataaacagtttaattataaagatccggtgaatggcgtggatattgcgtatattaaaattccgaatgcgggccagatgcagccggtgaaagcgtttaaaattcataataaaatttgggtgattccggaacgtgatacctttaccaatccggaagaaggcgatctgaatccgccgccggaagcgaaacaggtgccggtgagctattatgatagcacctatctgagcaccgataatgaaaaagataattatctgaaaggcgtgaccaaactgtttgaacgtatttatagcaccgatctgggccgtatgctgctgaccagcattgtgcgtggcattccgttttggggcggcagcaccattgataccgaactgaaagtgattgataccaattgcattaatgtgattcagccggatggcagctatcgtagcgaagaactgaatctggtgattattggcccgagcgcggatattattcagtttgaatgcaaaagctttggccatgaagtgctgaatctgacccgtaatggctatggcagcacccagtatattcgttttagcccggattttacctttggctttgaagaaagcctggaagtggataccaatccgctgctgggcgcgggcaaatttgcgaccgatccggcggtgaccctggcgcatgaactgattcatgcgggccatcgtctgtatggcattgcgattaatccgaatcgtgtgtttaaagtgaataccaatgcgtattatgaaatgagcggcctggaagtgagctttgaagaactgcgtacctttggcggccatgatgcgaaatttattgatagcctgcaggaaaatgaatttcgtctgtattattataataaatttaaagatattgcgagcaccctgaataaagcgaaaagcattgtgggcaccaccgcgagcctgcagtatatgaaaaatgtgtttaaagaaaaatatctgctgagcgaagataccagcggcaaatttagcgtggataaactgaaatttgataaactgtataaaatgctgaccgaaatttataccgaagataattttgtgaaattttttaaagtgctgaatcgtaaaacctatctgaattttgataaagcggtgtttaaaattaatattgtgccgaaagtgaattataccatttatgatggctttaatctgcgtaataccaatctggcggcgaattttaatggccagaataccgaaattaataatatgaattttaccaaactgaaaaattttaccggcctgtttgaattttataaactgctgtgcgtgcgtggcattattaccagcaaaaccaaaagcctggataaaggctataataaagcgctgaatgatctgtgcattaaagtgaataattgggatctgttttttagcccgagcgaagataattttaccaatgatctgaataaaggcgaagaaattaccagcgataccaatattgaagcggcggaagaaaatattagcctggatctgattcagcagtattatctgacctttaattttgataatgaaccggaaaatattagcattgaaaatctgagcagcgatattattggccagctggaactgatgccgaatattgaacgttttccgaatggcaaaaaatatgaactggataaatataccatgtttcattatctgcgtgcgcaggaatttgaacatggcaaaagccgtattgcgctgaccaatagcgtgaatgaagcgctgctgaatccgagccgtgtgtataccttttttagcagcgattatgtgaaaaaagtgaataaagcgaccgaagcggcgatgtttctgggctgggtggaacagctggtgtatgattttaccgatgaaaccagcgaagtgagcaccaccgataaaattgcggatattaccattattattccgtatattggcccggcgctgaatattggcaatatgctgtataaagatgattttgtgggcgcgctgatttttagcggcgcggtgattctgctggaatttattccggaaattgcgattccggtgctgggcacctttgcgctggtgagctatattgcgaataaagtgctgaccgtgcagaccattgataatgcgctgagcaaacgtaatgaaaaatgggatgaagtgtataaatatattgtgaccaattggctggcgaaagtgaatacccagattgatctgattcgtaaaaaaatgaaagaagcgctggaaaatcaggcggaagcgaccaaagcgattattaattatcagtataatcagtataccgaagaagaaaaaaataatattaattttaatattgatgatctgagcagcaaactgaatgaaagcattaataaagcgatgattaatattaataaatttctgaatcagtgcagcgtgagctatctgatgaatagcatgattccgtatggcgtgaaacgtctggaagattttgatgcgagcctgaaagatgcgctgctgaaatatatttatgataatcgtggcaccctgattggccaggtggatcgtctgaaagataaagtgaataataccctgagcaccgatattccgtttcagctgagcaaatatgtggataatcagcgtctgctgagcacctttaccgaatatattaaaaatattattaataccagcattctgaatctgcgttatgaaagcaatcatctgattgatctgagccgttatgcgagcaaaattaatattggcagcaaagtgaattttgatccgattgataaaaatcagattcagctgtttaatctggaaagcagcaaaattgaagtgattctgaaaaatgcgattgtgtataatagcatgtatgaaaattttagcaccagcttttggattcgtattccgaaatattttaatagcattagcctgaataatgaatataccattattaattgcatggaaaataatagcggctggaaagtgagcctgaattatggcgaaattatttggaccctgcaggatacccaggaaattaaacagcgtgtggtgtttaaatatagccagatgattaatattagcgattatattaatcgttggatttttgtgaccattaccaataatcgtctgaataatagcaaaatttatattaatggccgtctgattgatcagaaaccgattagcaatctgggcaatattcatgcgagcaataatattatgtttaaactggatggctgccgtgatacccatcgttatatttggattaaatattttaatctgtttgataaagaactgaatgaaaaagaaattaaagatctgtatgataatcagagcaatagcggcattctgaaagatttttggggcgattatctgcagtatgataaaccgtattatatgctgaatctgtatgatccgaataaatatgtggatgtgaataatgtgggcattcgtggctatatgtatctgaaaggcccgcgtggcagcgtgatgaccaccaatatttatctgaatagcagcctgtatcgtggcaccaaatttattattaaaaaatatgcgagcggcaataaagataatattgtgcgtaataatgatcgtgtgtatattaatgtggtggtgaaaaataaagaatatcgtctggcgaccaatgcgagccaggcgggcgtggaaaaaattctgagcgcgctggaaattccggatgtgggcaatctgagccaggtggtggtgatgaaaagcaaaaatgatcagggcattaccaataaatgcaaaatgaatctgcaggataataatggcaatgatattggctttattggctttcatcagtttaataatattgcgaaactggtggcgagcaattggtataatcgtcagattgaacgtagcagccgtaccctgggctgcagctgggaatttattccggtggatgatggctggggcgaacgtccgctgtaa

SEQ ID NO: 6 - DNA, 3891 bp, Artificial Sequence
  BoNT/A, E. coli-modified 4
atgcccttcgtgaataaacagttcaactataaagaccctgtgaatggtgtagacatcgcctatatcaagattccgaatgcaggtcagatgcagccagtgaaagcgttcaaaattcataataagatctgggtgattcctgaacgtgatacgttcacgaacccggaagagggtgatttgaacccacctcccgaagcaaaacaggtgccagtgagctattacgactctacgtacctcagtacagacaacgagaaagataactacctgaagggcgtaacaaaactgttcgaacggatttatagtacagacctcgggcgcatgctgttaaccagtattgtccgtggaattccgttttggggcggttcaacaattgataccgaactgaaggtcattgataccaactgcattaacgttatccagcctgatgggtcctatcgttcggaagagcttaaccttgtgattatcggtccttcggccgatattatccagtttgaatgtaaatcctttggccatgaagtattaaatctgacccgcaatggctatgggtctactcagtatattcgttttagtccggattttacctttggctttgaagagagtttagaagttgatacaaatccgctgttaggtgcaggcaaattcgccaccgatccggcggtgaccctggcacatgaacttatccatgcagggcaccgtctgtatggtatcgccattaatccgaatcgtgtttttaaggttaatactaatgcatactatgagatgagtggtctggaagttagctttgaggaattacgcacgttcgggggtcatgatgcgaaattcattgactcactccaggaaaatgaatttcgcctgtattactataataaatttaaagatatcgcgtcgaccctgaataaagcaaaatctattgtgggaacaaccgcatcgttgcagtacatgaaaaacgtttttaaagagaaatatttactctcagaagatacttcaggaaagttctctgtagataaattgaaattcgataaattgtacaagatgttaaccgaaatctacactgaagataactttgttaaatttttcaaagttctgaatcgtaagacctatcttaacttcgataaagcggttttcaaaattaatatcgttccgaaagtgaactatactatttatgacggttttaatctccgcaacacgaacctcgcggctaactttaatggccagaacaccgagatcaataacatgaactttacgaaactgaaaaattttaccggcctgttcgagttttataaactgctttgtgtgcgtggtattatcacgtcaaaaaccaaatctctggacaaaggctataataaggccctcaatgatctgtgtatcaaggtcaataactgggatctgtttttctccccctcagaagataattttacgaacgacctgaacaaaggagaagagatcacttctgataccaacatcgaggctgccgaagagaatattagcctggacctgattcaacagtattacctgactttcaattttgacaatgaacctgaaaatatttctatcgagaatctgtcatccgacattatcggtcaattagaactgatgccgaatattgaacgttttccgaatggtaaaaagtacgagttggataaatatacaatgttccattatttgcgggcccaggagtttgaacatggcaaatcccggatcgctcttacgaacagcgtcaacgaagcgctgcttaatccgtctcgtgtctacacgttctttagtagcgactacgttaaaaaggtaaataaggcgacggaagctgcgatgttcttaggttgggtggaacagctggtatatgacttcaccgatgaaacgagtgaagtttctacaaccgacaaaattgcagatattactattatcattccatatattggtccggcactgaacattggcaatatgctgtacaaagatgactttgtgggagccctgatttttagcggcgctgtgattctgttagagttcattccggaaattgcgattcccgtcctgggcacgtttgcgcttgttagctacattgctaataaggtgctgaccgttcaaaccatcgacaatgccctctcgaaacgcaatgaaaaatgggatgaggtgtacaaatatattgttacaaactggttagccaaagtgaacacccagattgatctgattcgcaagaaaatgaaagaggcgttagaaaaccaggccgaggcaacgaaagccatcattaactatcagtacaatcaatacactgaggaagagaaaaataacattaattttaatattgatgacctgagctccaaactgaacgaaagcattaataaggcaatgattaacattaataaattcctgaatcaatgttctgtttcgtacctgatgaactcaatgatcccatatggcgttaaacgtctcgaggattttgacgcatcattgaaagacgcgcttttaaaatacatctatgataatcgtgggacgctgatcggccaagtggatcgtttgaaggataaagttaataacaccctgagtacggatattccatttcaactgtccaaatacgtggacaaccagcggttgctttcaacttttaccgagtatatcaagaatattatcaacacgagtatccttaatctgcgctatgaaagtaatcacctgattgatctgagccgctatgcttcgaaaattaatatcggcagcaaagtgaatttcgatcctatcgataaaaaccaaattcagttgttcaacttggaatcgagtaagatcgaggtgattcttaagaacgcgattgtctacaacagcatgtacgaaaatttttccacctccttctggattcgtattccgaaatattttaactcgattagtttaaacaatgaatatactattatcaactgcatggaaaacaattccggatggaaagtatcactgaattatggagaaattatctggacactgcaggatactcaagaaattaaacaacgtgtcgtattcaaatatagccaaatgattaatatctctgactatatcaaccgttggatctttgtgaccattactaataaccgtctgaacaattcgaaaatttacatcaacggccgccttattgatcaaaagccaatttccaacctgggtaacattcacgcgtcaaataacatcatgtttaaactggatggttgccgtgatacccaccgttacatttggatcaaatattttaacctgttcgataaggaacttaacgaaaaagaaattaaagatttatatgacaatcagagcaacagtggtatcttgaaggatttttggggtgattatctgcagtacgataagccctattacatgctgaatctctatgacccgaataaatatgtagacgtaaacaatgtcggaattcgtggctatatgtatttaaaaggcccgcgcgggtcggttatgacaaccaatatttacttaaatagctccctgtaccgcgggaccaaatttatcattaagaaatatgcttctggtaacaaggacaacattgttcgcaataacgatcgtgtctatatcaacgtagtcgtaaaaaataaggaatatcggttggctacaaacgccagccaggcgggtgtcgaaaaaattctcagcgctttggaaatcccggatgtgggcaacctgtctcaggtcgttgtgatgaaaagcaagaacgatcagggaatcactaataaatgcaaaatgaacctgcaggataataacggcaatgacattggcttcatcgggtttcaccaatttaacaatattgcgaaactggtcgcctcaaattggtacaaccgccagattgagcgttctagccgtacactggggtgcagctgggaattcattccagtcgatgacggttggggcgaacgtccgctgtaa

SEQ ID NO: 7 - DNA, 3891 bp, Artificial Sequence
  BoNT/A, B. fragilis-modified 1
atgccgttcgtaaacaaacagtttaactataaggatccggtgaacggagtcgatatagcatacatcaaaatccctaatgcggggcagatgcagccggtaaaagcattcaaaatccataataaaatttgggtaatcccggagcgtgacacttttacgaacccggaggaaggtgaccttaatccccctccagaagctaaacaagtgccggtcagttactatgatagtacatatttgtcgacagataacgaaaaagacaactatctgaagggcgtgaccaaattgtttgaacgtatatattccacagatttgggacgtatgcttttgactagcattgtacgcggaatccctttttggggaggctccacgattgatactgagcttaaagttatcgacacgaattgtatcaatgtgatacagcccgatggatcctatcgcagcgaagagctgaacttggtgatcataggacccagtgcagatataatccaatttgaatgcaaatcgttcggccacgaagtccttaacctgacaaggaatggttatggatcaactcagtatatccggttttctcccgacttcacattcggtttcgaagagtcactggaagtggacaccaatcctcttctgggagctggaaaattcgccacagatcctgctgtgaccctagcccatgaacttatccatgccggacaccgtctgtacggaatagcaattaacccaaatagagtgttcaaagtaaacactaacgcctattacgaaatgagcggtctcgaagtttcttttgaggaactgcgtacgttcggaggtcacgacgctaaattcatcgattcacttcaagaaaacgagttccgcctttattactataataaatttaaagacattgcgtccacactgaacaaagcaaaaagtatagtcggtacaacggcgtcattacaatacatgaaaaatgtttttaaagaaaaatacctattgagtgaggacacttcggggaaattctccgtggacaagctgaaatttgataaactctacaagatgctgacagaaatttatacggaagacaattttgttaagttctttaaggtcctgaaccgcaaaacgtatctaaacttcgacaaagctgttttcaagattaatatagtgcctaaagttaactataccatttatgatgggttcaatctgcggaatactaatctcgcagctaactttaacggacaaaataccgaaattaacaatatgaattttaccaagttgaagaactttactggattgtttgaattttataaactactgtgcgttcggggcattatcactagtaaaaccaaaagccttgataagggatataataaagctttgaatgatttgtgcataaaagtgaataactgggatttgtttttctctccctctgaagataattttacaaacgatctgaataaaggcgaagagattaccagcgacacgaacattgaagccgctgaagagaatatctcgctggatcttattcaacagtattacttaacattcaactttgataacgagccggaaaatatttctatcgaaaatctgtcgagcgatattataggtcaattagaattaatgccgaatatcgaacgttttccgaatggtaaaaagtatgaattggataaatatactatgttccattacttgcgggcccaagagtttgaacatggtaaatcacgcatagccttgaccaattcagtcaatgaggcattgctgaaccccagtagagtttatactttctttagttctgattatgtgaaaaaggtaaacaaggctaccgaggcagcgatgtttctaggatgggtcgagcagctcgtatatgattttactgatgaaacaagcgaggtcagcacgactgacaagatagctgatatcactatcattataccttatattgggccggcccttaatattggtaatatgctgtataaggatgacttcgtaggcgcgctgatcttctctggtgcagtgatcttacttgaatttattcctgaaatcgccatcccggtgctgggaacatttgccctggtgtcctacattgctaacaaggtgttgacagttcagacgattgataatgcactttcgaaacggaacgagaagtgggatgaggtgtataagtacattgtaactaattggctggccaaggtcaatacgcagattgaccttatccgtaagaaaatgaaagaagctctggagaaccaggcagaagccaccaaggctatcattaattatcaatacaatcaatatactgaagaggaaaagaataacatcaatttcaacatcgacgatttgtcgagcaagttaaatgagtcgattaataaggccatgatcaacatcaataagttcctaaatcagtgttccgtaagttatcttatgaatagtatgattccttatggcgtaaagcgacttgaagacttcgatgcatcactcaaagacgcgttgctgaaatacatctacgacaatcgtggaacattaatagggcaagtggaccgtctgaaagacaaagtcaataacaccctgtccacggatataccttttcagctgagtaagtatgttgataaccaaagattgctctcgacattcactgaatatataaaaaatataattaatacctcgatcttgaatttaagatacgaatcaaaccatttgattgatctgtctaggtatgcttctaaaataaatatagggtctaaggtaaatttcgatcccatcgataaaaatcagatccagttatttaatttagagtcttccaaaatcgaagttattctcaaaaacgcaattgtgtataactcaatgtacgaaaattttagcacaagcttttggatccgtataccgaaatatttcaattcgatctcattaaacaatgaatataccattatcaattgtatggaaaacaattcaggatggaaggtatcactgaactatggcgaaataatctggacattgcaggatacccaggagataaaacagcgtgttgtattcaaatattcgcaaatgattaatatatctgattatataaaccgctggatttttgtaaccattaccaacaatcgattgaacaattctaagatttatatcaatggacgtttgattgatcagaagccgatatccaatcttggaaacatccacgctagtaacaatattatgttcaaattagatggctgtcgcgatacgcatcggtacatatggattaagtattttaatttgttcgataaagagctgaatgaaaaggaaatcaaagatctctacgataatcagagtaacagcggcattttgaaggatttctggggtgactacctgcaatatgataagccgtattacatgttgaacttatacgacccaaacaaatatgtggatgtaaacaatgtaggtatccgaggttatatgtacttgaaaggcccccgtggttcggtaatgactaccaacatttatctcaatagttctctgtataggggaactaaattcattataaaaaagtatgcatctggaaataaagacaacattgtacgtaataacgacagagtatatataaatgtcgtagttaagaataaagagtatcggttagccaccaatgcaagccaagccggggtagaaaaaatcctgtccgcccttgaaattccagacgttgggaatttatcccaagtagtcgttatgaaatctaaaaatgatcaaggtatcaccaataaatgtaaaatgaatttgcaggataacaatggtaatgacataggctttatcggatttcatcagtttaacaatattgctaaattagtagccagtaactggtataatagacaaattgaacgctcttcccgcacactcggttgcagttgggaatttatacccgtggacgacggttggggtgaacgtcctctctaa

SEQ ID NO: 8 - DNA, 3891 bp, Artificial Sequence
  BoNT/A, B. fragilis-modified 2
atgccgtttgtaaataaacagtttaattataaagatccggtaaatggagtagatattgcctatattaaaattccgaatgccggacagatgcagccggtaaaagcctttaaaattcataataaaatttgggtaattccggaacgtgatacctttaccaatccggaagaaggagatctgaatccgccgccggaagccaaacaggtaccggtatcttattatgattctacctatctgtctaccgataatgaaaaagataattatctgaaaggagtaaccaaactgtttgaacgtatttattctaccgatctgggacgtatgctgctgacctctattgtacgtggaattccgttttggggaggatctaccattgataccgaactgaaagtaattgataccaattgtattaatgtaattcagccggatggatcttatcgttctgaagaactgaatctggtaattattggaccgtctgccgatattattcagtttgaatgtaaatcttttggacatgaagtactgaatctgacccgtaatggatatggatctacccagtatattcgtttttctccggattttacctttggatttgaagaatctctggaagtagataccaatccgctgctgggagccggaaaatttgccaccgatccggccgtaaccctggcccatgaactgattcatgccggacatcgtctgtatggaattgccattaatccgaatcgtgtatttaaagtaaataccaatgcctattatgaaatgtctggactggaagtatcttttgaagaactgcgtacctttggaggacatgatgccaaatttattgattctctgcaggaaaatgaatttcgtctgtattattataataaatttaaagatattgcctctaccctgaataaagccaaatctattgtaggaaccaccgcctctctgcagtatatgaaaaatgtatttaaagaaaaatatctgctgtctgaagatacctctggaaaattttctgtagataaactgaaatttgataaactgtataaaatgctgaccgaaatttataccgaagataattttgtaaaattttttaaagtactgaatcgtaaaacctatctgaattttgataaagccgtatttaaaattaatattgtaccgaaagtaaattataccatttatgatggatttaatctgcgtaataccaatctggccgccaattttaatggacagaataccgaaattaataatatgaattttaccaaactgaaaaattttaccggactgtttgaattttataaactgctgtgtgtacgtggaattattacctctaaaaccaaatctctggataaaggatataataaagccctgaatgatctgtgtattaaagtaaataattgggatctgtttttttctccgtctgaagataattttaccaatgatctgaataaaggagaagaaattacctctgataccaatattgaagccgccgaagaaaatatttctctggatctgattcagcagtattatctgacctttaattttgataatgaaccggaaaatatttctattgaaaatctgtcttctgatattattggacagctggaactgatgccgaatattgaacgttttccgaatggaaaaaaatatgaactggataaatataccatgtttcattatctgcgtgcccaggaatttgaacatggaaaatctcgtattgccctgaccaattctgtaaatgaagccctgctgaatccgtctcgtgtatatacctttttttcttctgattatgtaaaaaaagtaaataaagccaccgaagccgccatgtttctgggatgggtagaacagctggtatatgattttaccgatgaaacctctgaagtatctaccaccgataaaattgccgatattaccattattattccgtatattggaccggccctgaatattggaaatatgctgtataaagatgattttgtaggagccctgattttttctggagccgtaattctgctggaatttattccggaaattgccattccggtactgggaacctttgccctggtatcttatattgccaataaagtactgaccgtacagaccattgataatgccctgtctaaacgtaatgaaaaatgggatgaagtatataaatatattgtaaccaattggctggccaaagtaaatacccagattgatctgattcgtaaaaaaatgaaagaagccctggaaaatcaggccgaagccaccaaagccattattaattatcagtataatcagtataccgaagaagaaaaaaataatattaattttaatattgatgatctgtcttctaaactgaatgaatctattaataaagccatgattaatattaataaatttctgaatcagtgttctgtatcttatctgatgaattctatgattccgtatggagtaaaacgtctggaagattttgatgcctctctgaaagatgccctgctgaaatatatttatgataatcgtggaaccctgattggacaggtagatcgtctgaaagataaagtaaataataccctgtctaccgatattccgtttcagctgtctaaatatgtagataatcagcgtctgctgtctacctttaccgaatatattaaaaatattattaatacctctattctgaatctgcgttatgaatctaatcatctgattgatctgtctcgttatgcctctaaaattaatattggatctaaagtaaattttgatccgattgataaaaatcagattcagctgtttaatctggaatcttctaaaattgaagtaattctgaaaaatgccattgtatataattctatgtatgaaaatttttctacctctttttggattcgtattccgaaatattttaattctatttctctgaataatgaatataccattattaattgtatggaaaataattctggatggaaagtatctctgaattatggagaaattatttggaccctgcaggatacccaggaaattaaacagcgtgtagtatttaaatattctcagatgattaatatttctgattatattaatcgttggatttttgtaaccattaccaataatcgtctgaataattctaaaatttatattaatggacgtctgattgatcagaaaccgatttctaatctgggaaatattcatgcctctaataatattatgtttaaactggatggatgtcgtgatacccatcgttatatttggattaaatattttaatctgtttgataaagaactgaatgaaaaagaaattaaagatctgtatgataatcagtctaattctggaattctgaaagatttttggggagattatctgcagtatgataaaccgtattatatgctgaatctgtatgatccgaataaatatgtagatgtaaataatgtaggaattcgtggatatatgtatctgaaaggaccgcgtggatctgtaatgaccaccaatatttatctgaattcttctctgtatcgtggaaccaaatttattattaaaaaatatgcctctggaaataaagataatattgtacgtaataatgatcgtgtatatattaatgtagtagtaaaaaataaagaatatcgtctggccaccaatgcctctcaggccggagtagaaaaaattctgtctgccctggaaattccggatgtaggaaatctgtctcaggtagtagtaatgaaatctaaaaatgatcagggaattaccaataaatgtaaaatgaatctgcaggataataatggaaatgatattggatttattggatttcatcagtttaataatattgccaaactggtagcctctaattggtataatcgtcagattgaacgttcttctcgtaccctgggatgttcttgggaatttattccggtagatgatggatggggagaacgtccgctgtaa

SEQ ID NO: 9 - DNA, 3891 bp, Artificial Sequence
  BoNT/A, B. fragilis-modified 3
atgccttttgttaataaacaattcaattacaaagatcctgtaaacggtgtggatatcgcatatataaagatccccaatgctggccaaatgcagcctgtcaaggcttttaaaatacataataaaatctgggtaattcctgaacgggataccttcactaatcctgaagagggagatctcaaccctcccccggaagctaaacaggttcccgtcagctactatgactccacgtatcttagtaccgataatgaaaaagacaattacttgaaaggtgttaccaaattatttgaacggatttatagtaccgatttaggccgtatgctcttaacctctatagttcgtggaataccgttttggggaggctctactattgacactgagttgaaagttatcgataccaactgcattaatgtgattcagcccgatggtagttaccgttctgaagagctgaacctggtaatcataggaccgtcagctgatataattcagtttgagtgtaaatcctttggacatgaggtattgaacttgactcgtaacggatatggaagtacgcaatatattagatttagcccggattttacgtttggattcgaagagtctctggaggtggatacaaatccgctgttgggagccggaaaattcgccaccgatcctgcagtaacgttggcccacgaacttatccacgccggacatagattgtacggtattgcaataaatccgaatcgtgtgtttaaggtgaatactaatgcctattacgaaatgtcgggtctcgaagtgagcttcgaagagcttagaacgtttggtggccatgatgcaaaatttattgacagcctgcaagaaaatgaattccgtctgtactattacaataagttcaaggacatcgccagcacactgaataaagcaaaaagcattgtaggcacaacggcttcacttcagtacatgaaaaacgtgttcaaagaaaagtacctgcttagtgaagacacttcgggaaagttttcggtcgataagctgaagtttgacaaattgtataaaatgctcacagaaatttatacggaggacaatttcgtgaaatttttcaaggtattaaaccgtaaaacgtacctgaactttgacaaagccgtgttcaaaataaacattgtgccgaaagttaactatacaatatatgatggatttaaccttcggaacacaaatctcgccgctaattttaatggtcaaaacaccgaaatcaacaatatgaatttcacaaagcttaaaaactttacaggactgtttgagttctataaacttctgtgcgtgcgtggtatcattaccagtaagacaaaatccttggataagggttacaacaaagcattgaacgacttgtgtatcaaggtcaataactgggatctgttctttagtcccagtgaagataattttactaatgatttgaacaagggagaagagatcacgtcagatactaatattgaagcagctgaagagaatataagccttgacctgattcagcaatattacttgacgtttaatttcgataacgagccggaaaatatctcgatagaaaatttgtctagtgatattataggtcagctcgaattaatgccgaacattgagcgttttcctaatggcaaaaagtatgaactcgacaaatatactatgtttcattatttgcgggcccaagaatttgaacacggtaaaagtcggatcgctttaacgaattctgttaacgaggccttattgaatccctcacgtgtatatactttctttagttcggattacgtgaagaaagtgaataaagccaccgaagctgccatgttcttgggctgggtagaacagctggtatatgatttcacagatgaaacatctgaggtatccacaaccgataaaattgctgatatcacaattatcataccttatattggaccggctctgaatataggaaatatgttatataaagacgatttcgttggagcccttatcttttctggtgctgttatcctgcttgaattcatcccggaaattgcaattcccgtcttgggaaccttcgccctcgtttcttacattgccaataaagtcctgacagtgcagaccatcgataatgccctgtcgaagcgcaacgaaaagtgggacgaagtgtataaatatatcgttaccaattggctggccaaagtaaatacacagattgatttaatacgtaagaaaatgaaggaagccttggagaatcaagctgaagcaacaaaggccatcattaattatcagtataatcagtatactgaagaggaaaaaaacaatattaatttcaacatagacgatttgtccagcaaattaaacgaatcaataaacaaagcaatgattaatattaataaattccttaatcaatgttccgtatcctatctgatgaacagcatgataccgtatggagtaaaacggttagaggactttgatgcatccctgaaagatgccctgttgaaatatatctacgataatcgtggaactcttataggccaagtggaccgtttgaaagataaagtgaataacactcttagtaccgatattccgtttcaattatcaaagtatgttgacaatcaacgtctgctttcgactttcaccgagtatatcaaaaatatcattaatacaagtatcttgaatctgagatatgaaagcaatcatttaatcgacctgtcgagatacgcctctaagataaatatcggctctaaagtcaactttgacccgattgataaaaatcaaatccagctgtttaacctggaaagctctaaaattgaagtcatcttgaagaatgcaatagtatataattctatgtatgagaatttcagcacctccttctggattcgcatcccgaaatatttcaactctatctctctcaacaatgaatacactattataaactgtatggaaaataacagtggatggaaagtatcgctgaactacggtgaaatcatatggaccctccaggatacacaggagattaaacagcgtgtagtttttaaatactcccagatgatcaatatatccgactatattaaccgctggatcttcgtaactattactaacaatcgtttaaacaattcgaaaatttacattaatggtcggcttattgaccaaaagcccatatccaaccttggaaatatacatgcatctaacaatattatgttcaagctcgatggatgcagagatactcaccgttatatttggatcaagtatttcaacctgtttgacaaagagctgaacgagaaggaaatcaaagatctgtacgataaccagtcaaattctggaatcttgaaggatttttggggagattatctgcagtatgacaaaccgtattacatgttaaacctttatgaccctaataagtatgtagatgtcaataacgtgggtatacgcggatatatgtatttaaagggtccgcgtggttcggtaatgactacgaacatctatctgaacagttccttgtatcgcggtaccaagttcattatcaagaaatatgcatcgggaaacaaggataatatagtacgtaataacgaccgcgtctatatcaatgtggttgtaaaaaataaggaatatcgtttggccaccaatgcctcacaagcaggtgtggagaaaatcctgagtgctttggaaatacctgatgtaggcaatctgtcacaggtcgtagtcatgaaatcgaaaaatgaccaaggtatcacaaacaaatgcaagatgaacctgcaggacaataacggaaacgatattggattcatcggcttccatcaatttaacaatattgctaaattggtggctagcaattggtataatcgccaaatcgaacgctcatcacgcacgctgggatgttcatgggaatttataccggttgacgacggctggggagaacgtcccctgtaa

SEQ ID NO: 10 - DNA, 3891 bp, Artificial Sequence
  BoNT/A, B. licheniformis-modified 1
atgccgtttgtgaataaacagtttaattataaggatcccgtcaatggggtcgatattgcctatatcaaaatccctaatgccggccagatgcaaccggttaaggcattcaaaatccataataagatctgggtgataccggaacgcgatacatttacaaaccctgaagagggcgatcttaacccaccgccagaagcgaaacaagtccctgtctcctactatgactcgacgtatttgtcaacggataatgaaaaagataattatctgaaaggcgtcactaaactgttcgaacggatctatagcacagacctaggccgcatgctcttgacgagcatcgtaagaggcatcccgttttggggagggtccaccatcgacacagagctcaaggtgatcgatacaaactgcataaacgttatccagccggatggatcttatcgcagcgaagagcttaacctcgtgatcattgggccgagcgcggacatcattcagttcgagtgcaagtcgtttggtcacgaagtactcaatttgaccagaaacggctacggatccactcaatacattaggttttcccccgattttacgttcggattcgaagagtcacttgaagttgatactaacccattacttggcgccgggaaatttgcgactgaccccgcggttacactagcacatgaactcatccatgcaggacaccgcctttatggaatcgcgatcaatccgaaccgcgtgtttaaagtcaatactaatgcatattacgagatgtcaggcctagaagtttcatttgaagagttgcgtacctttgggggccacgatgccaaatttatcgacagcctgcaagaaaacgaatttcgcctctattactataacaaatttaaagacattgcgtctaccttaaacaaagccaaatccatcgtcggcacgaccgctagcctccaatacatgaaaaatgtctttaaagagaaatatttgctttctgaagacaccagcggtaagttcagcgtggataaattaaaattcgacaagctttataagatgctgacagaaatatacactgaagataattttgttaagtttttcaaagttttgaaccgcaaaacgtacttgaactttgacaaagcagtcttcaagattaatattgtcccgaaagtgaactataccatttacgacggttttaatttacggaatacgaacttagcagctaattttaacggacagaacacggaaatcaacaatatgaatttcacgaagcttaaaaacttcacaggtctgtttgaattctataaattgctctgtgtcagggggatcataacaagcaagacaaagagcctggacaagggctataacaaagcacttaatgacctttgcattaaggtgaacaattgggacttgtttttcagcccttctgaagataatttcacaaatgatttaaacaaaggagaagagatcacctcggacacgaatatcgaggctgcggaggaaaacatttcgttagatttaatccagcaatattacctgacatttaactttgacaacgagccggaaaacattagcattgaaaacttaagctccgatatcataggccagctcgagcttatgcctaatattgaacgttttcctaatggaaaaaagtatgaactggacaaatatacaatgtttcattatttgagagcccaagagttcgaacatggaaagagcaggattgccctgacaaatagtgtaaacgaagccttgttaaatccgtcccgcgtttacacgttcttttcatcggactacgtaaaaaaggtaaacaaggcgacagaagcggctatgtttcttggttgggtggaacagctcgtttacgacttcacggatgagacaagcgaagtctctacgaccgataaaatcgcagatattacaatcataatcccgtatatcgggcccgcacttaacatcggcaacatgctgtataaagacgattttgttggcgcactgattttcagtggcgcggtcattctcttggaattcattccggaaattgcgatacctgtgcttggaacgtttgccctggttagttacatcgcgaacaaggtcttgacagtccaaaccattgataatgcactttcgaagcgcaatgaaaaatgggatgaagtttataaatatatcgtcacgaactggttagcgaaagttaacacgcagatcgacttgattcgtaaaaagatgaaagaagcccttgagaatcaagccgaagctacaaaagctatcattaactatcaatataatcagtacacggaagaggaaaaaaataacattaactttaatatagacgatctctctagcaaactgaacgagtccattaacaaggctatgatcaacatcaataaattccttaaccagtgcagtgtgtcatatctgatgaactcgatgatcccgtacggagttaaaagacttgaagattttgatgcctctcttaaagatgcgctgcttaaatatatctacgacaaccgtggtacactgattggtcaagtcgatagacttaaggataaagtgaacaatacgctgtcaacggatattccttttcaattgagcaaatacgtcgataatcagagactgttatctacctttacggaatacatcaaaaacattatcaacacgtcgatccttaatttaagatacgaatcaaaccatctgatcgatctgtccagatatgcctcaaaaatcaatataggatcaaaagtaaattttgacccgatcgataaaaaccagatacagctgttcaatctcgagtcttcaaaaatcgaagtaattcttaagaatgcgatcgtctataattcgatgtatgaaaactttagcacatcattctggattaggattccgaaatactttaattcgatttcactgaacaatgagtacacgattatcaactgcatggagaacaattccgggtggaaagtatctctgaattacggagaaattatctggacattgcaggacacccaagaaattaaacagcgggtggtctttaaatactcacagatgatcaacatctccgattatataaatcgatggatctttgtgaccatcacaaacaataggctgaataactcaaagatctatatcaacggaagattaattgaccagaaaccaatttcaaacctcggcaacattcacgcttcgaacaatatcatgttcaaacttgatggttgtcgggacactcatcggtatatttggatcaagtattttaatttattcgacaaggagctcaacgagaaagaaattaaagatctctatgacaatcaatctaacagcgggattctgaaggatttttggggagactatctgcagtacgacaaaccgtactatatgctgaatctgtatgatcccaataaatatgtggatgttaataacgttggcattcggggatatatgtacttgaaaggcccgcgaggatcggtgatgacgactaacatttacctgaatagctcgctatacaggggaacgaagtttatcattaaaaagtatgcgtccggcaataaagataatattgtccggaataacgaccgagtctatatcaatgtcgtagtcaaaaacaaagaataccgtttagctacgaacgcttctcaagctggtgtagaaaagattctttctgccttggaaatccctgatgtcgggaacctgagccaagtggttgtcatgaaaagcaaaaatgatcaaggcataacgaataaatgcaaaatgaacttgcaggacaacaatggcaatgatattggatttattggcttccaccaatttaacaatattgcaaaacttgttgcctccaattggtataatcgccagattgaaagatcaagtcgcacgctcgggtgttcgtgggaatttatcccggttgacgatggctggggcgaacggccgttgtaa

SEQ ID NO: 11 - DNA, 3891 bp, Artificial Sequence
  BoNT/A, B. licheniformis-modified 2
atgccgtttgtcaacaaacagtttaactataaagatccggtcaacggcgtcgatatcgcgtatatcaaaatcccgaacgcgggccagatgcagccggtcaaagcgtttaaaatccataacaaaatctgggtcatcccggaacgcgatacgtttacgaacccggaagaaggcgatctgaacccgccgccggaagcgaaacaggtcccggtcagctattatgatagcacgtatctgagcacggataacgaaaaagataactatctgaaaggcgtcacgaaactgtttgaacgcatctatagcacggatctgggccgcatgctgctgacgagcatcgtccgcggcatcccgttttggggcggcagcacgatcgatacggaactgaaagtcatcgatacgaactgcatcaacgtcatccagccggatggcagctatcgcagcgaagaactgaacctggtcatcatcggcccgagcgcggatatcatccagtttgaatgcaaaagctttggccatgaagtcctgaacctgacgcgcaacggctatggcagcacgcagtatatccgctttagcccggattttacgtttggctttgaagaaagcctggaagtcgatacgaacccgctgctgggcgcgggcaaatttgcgacggatccggcggtcacgctggcgcatgaactgatccatgcgggccatcgcctgtatggcatcgcgatcaacccgaaccgcgtctttaaagtcaacacgaacgcgtattatgaaatgagcggcctggaagtcagctttgaagaactgcgcacgtttggcggccatgatgcgaaatttatcgatagcctgcaggaaaacgaatttcgcctgtattattataacaaatttaaagatatcgcgagcacgctgaacaaagcgaaaagcatcgtcggcacgacggcgagcctgcagtatatgaaaaacgtctttaaagaaaaatatctgctgagcgaagatacgagcggcaaatttagcgtcgataaactgaaatttgataaactgtataaaatgctgacggaaatctatacggaagataactttgtcaaattttttaaagtcctgaaccgcaaaacgtatctgaactttgataaagcggtctttaaaatcaacatcgtcccgaaagtcaactatacgatctatgatggctttaacctgcgcaacacgaacctggcggcgaactttaacggccagaacacggaaatcaacaacatgaactttacgaaactgaaaaactttacgggcctgtttgaattttataaactgctgtgcgtccgcggcatcatcacgagcaaaacgaaaagcctggataaaggctataacaaagcgctgaacgatctgtgcatcaaagtcaacaactgggatctgttttttagcccgagcgaagataactttacgaacgatctgaacaaaggcgaagaaatcacgagcgatacgaacatcgaagcggcggaagaaaacatcagcctggatctgatccagcagtattatctgacgtttaactttgataacgaaccggaaaacatcagcatcgaaaacctgagcagcgatatcatcggccagctggaactgatgccgaacatcgaacgctttccgaacggcaaaaaatatgaactggataaatatacgatgtttcattatctgcgcgcgcaggaatttgaacatggcaaaagccgcatcgcgctgacgaacagcgtcaacgaagcgctgctgaacccgagccgcgtctatacgttttttagcagcgattatgtcaaaaaagtcaacaaagcgacggaagcggcgatgtttctgggctgggtcgaacagctggtctatgattttacggatgaaacgagcgaagtcagcacgacggataaaatcgcggatatcacgatcatcatcccgtatatcggcccggcgctgaacatcggcaacatgctgtataaagatgattttgtcggcgcgctgatctttagcggcgcggtcatcctgctggaatttatcccggaaatcgcgatcccggtcctgggcacgtttgcgctggtcagctatatcgcgaacaaagtcctgacggtccagacgatcgataacgcgctgagcaaacgcaacgaaaaatgggatgaagtctataaatatatcgtcacgaactggctggcgaaagtcaacacgcagatcgatctgatccgcaaaaaaatgaaagaagcgctggaaaaccaggcggaagcgacgaaagcgatcatcaactatcagtataaccagtatacggaagaagaaaaaaacaacatcaactttaacatcgatgatctgagcagcaaactgaacgaaagcatcaacaaagcgatgatcaacatcaacaaatttctgaaccagtgcagcgtcagctatctgatgaacagcatgatcccgtatggcgtcaaacgcctggaagattttgatgcgagcctgaaagatgcgctgctgaaatatatctatgataaccgcggcacgctgatcggccaggtcgatcgcctgaaagataaagtcaacaacacgctgagcacggatatcccgtttcagctgagcaaatatgtcgataaccagcgcctgctgagcacgtttacggaatatatcaaaaacatcatcaacacgagcatcctgaacctgcgctatgaaagcaaccatctgatcgatctgagccgctatgcgagcaaaatcaacatcggcagcaaagtcaactttgatccgatcgataaaaaccagatccagctgtttaacctggaaagcagcaaaatcgaagtcatcctgaaaaacgcgatcgtctataacagcatgtatgaaaactttagcacgagcttttggatccgcatcccgaaatattttaacagcatcagcctgaacaacgaatatacgatcatcaactgcatggaaaacaacagcggctggaaagtcagcctgaactatggcgaaatcatctggacgctgcaggatacgcaggaaatcaaacagcgcgtcgtctttaaatatagccagatgatcaacatcagcgattatatcaaccgctggatctttgtcacgatcacgaacaaccgcctgaacaacagcaaaatctatatcaacggccgcctgatcgatcagaaaccgatcagcaacctgggcaacatccatgcgagcaacaacatcatgtttaaactggatggctgccgcgatacgcatcgctatatctggatcaaatattttaacctgtttgataaagaactgaacgaaaaagaaatcaaagatctgtatgataaccagagcaacagcggcatcctgaaagatttttggggcgattatctgcagtatgataaaccgtattatatgctgaacctgtatgatccgaacaaatatgtcgatgtcaacaacgtcggcatccgcggctatatgtatctgaaaggcccgcgcggcagcgtcatgacgacgaacatctatctgaacagcagcctgtatcgcggcacgaaatttatcatcaaaaaatatgcgagcggcaacaaagataacatcgtccgcaacaacgatcgcgtctatatcaacgtcgtcgtcaaaaacaaagaatatcgcctggcgacgaacgcgagccaggcgggcgtcgaaaaaatcctgagcgcgctggaaatcccggatgtcggcaacctgagccaggtcgtcgtcatgaaaagcaaaaacgatcagggcatcacgaacaaatgcaaaatgaacctgcaggataacaacggcaacgatatcggctttatcggctttcatcagtttaacaacatcgcgaaactggtcgcgagcaactggtataaccgccagatcgaacgcagcagccgcacgctgggctgcagctgggaatttatcccggtcgatgatggctggggcgaacgcccgctgtaa

SEQ ID NO: 12 - DNA, 3891 bp, Artificial Sequence
  BoNT/A, B. licheniformis-modified 3
atgccgttcgttaataaacagtttaactataaagaccctgtgaacggagtggatattgcgtatattaagattccgaatgcgggccagatgcaacctgtcaaagcttttaaaatccataacaaaatctgggttatcccggaacgtgatacgtttaccaacccggaagagggcgatctgaaccctccgcctgaagcgaaacaggtgccggtctcatattacgattcgacgtaccttagcacagataacgaaaaagacaactatctcaaaggggtgacaaaactgtttgaacgcatttacagcacagacctgggccggatgctccttacatcaatcgtgagaggcatcccgttctggggtggatccaccattgacacggaactgaaagtgatcgacacgaattgcattaacgtcatccagccggatgggagctacaggtcggaggaactgaatcttgttattatcggtccgtctgcggacatcattcaattcgaatgtaaaagctttgggcatgaagttctcaacctgacgcggaacggttacggcagcacacaatatatccggtttagcccggactttacatttggctttgaagagagccttgaagtggatacaaatccgttgctgggagcgggaaaatttgcaaccgatccggccgttacacttgcacacgaattaatccatgcgggccaccgtctgtacggtatcgccattaatccgaacagagtttttaaagtcaacaccaacgcttactatgaaatgtccgggctggaggtcagctttgaagagttacgcacattcggcgggcacgatgcaaaatttatcgattcattgcaggagaatgaatttagactctattactataataaatttaaggacatcgcgtctaccctgaacaaagcaaaatctatcgttggcaccacggcatcattacaatatatgaaaaatgtcttcaaagaaaaatatttgcttagcgaagatacatcgggaaaattctccgttgacaaattgaaattcgataaactttataaaatgttaacggaaatctatacggaagataactttgtaaaattctttaaagtcctgaacaggaagacgtaccttaacttcgataaagcagtgttcaaaattaatatcgtacctaaggtcaactacaccatctacgacggatttaatcttagaaacacgaatctggcggcaaattttaatggacagaacacggaaattaataacatgaactttacaaagctcaagaacttcacgggactgtttgagttttacaagcttctgtgcgtgaggggtatcattacgtctaagacaaaaagcctcgacaaaggctataacaaagcattgaacgacttatgcattaaagtaaacaattgggatttatttttctcaccttctgaagataatttcacaaacgatttaaataagggcgaagagattacgagcgatacaaacattgaggccgcagaagagaatattagcttggacctcatccagcaatattaccttacgtttaattttgataacgaaccggaaaatatctcaatcgagaacctgtcatcggacatcattggccagttggagctgatgcctaacattgaacggttcccgaatgggaaaaagtatgaactggataagtatacgatgtttcattacctgcgggcccaggaatttgaacatggaaagagccgcattgccctcacgaattcagtcaatgaagccctcttgaacccgtctagggtctacacatttttctcctcagactatgtcaagaaagtcaacaaagccacagaggcggctatgtttttgggatgggtcgaacagctcgtttacgattttacggatgagacaagcgaggtctcaacgacagacaagatcgctgacattacaatcattatcccgtatatcggcccggccttaaacatcggtaacatgctttacaaagatgactttgtcggcgccctgattttttcgggcgcggtcatcttacttgagttcatcccggagatcgccatcccggtccttgggacctttgctcttgtaagctatattgccaataaagtgctcacagtgcaaacgattgataacgctctgagcaagcgtaatgaaaaatgggacgaagtctataaatatatcgtgacgaattggcttgcgaaagtaaacacgcagatcgacttgatccgtaaaaagatgaaggaagccctggaaaaccaagccgaagcgacgaaggcgattatcaattaccagtataaccagtacacggaagaggaaaagaacaatattaattttaacatcgacgatttgtctagcaagctcaatgaaagcattaataaagcaatgatcaatattaataaattccttaatcaatgctctgtcagctatctgatgaactcaatgattccgtatggagtgaagaggctggaggatttcgacgcttccctgaaagacgctttgcttaaatacatctacgataacagaggcacgttgatcggacaagttgacagacttaaggataaggtcaacaatacgctgtccacggacatcccgtttcagttaagcaaatacgttgataatcagcgcctgctttcgacatttaccgagtacatcaaaaacatcattaacacgtctattctgaatctgcgctatgaaagcaatcatctgatcgatttatccagatacgcatccaaaatcaatatcggatcgaaggttaacttcgatccgatcgataaaaaccagatccaactctttaatctcgaaagctctaagattgaagtaatcttaaaaaatgccattgtgtataacagcatgtatgagaatttctcaacgtcattttggatccgcatccctaaatatttcaattccatctcgctgaataacgaatatacgattatcaattgcatggaaaataactcaggatggaaggtgagcttgaattatggggagatcatttggaccctgcaggatacgcaagaaattaaacaacgcgtggtcttcaagtattcacaaatgattaacatttcggattacattaacagatggatcttcgttacgattaccaacaatagactgaataactcaaagatctacatcaatggccgcttgattgatcaaaaaccgatctctaatcttgggaacatccacgcctcgaacaatatcatgtttaaattggacggctgccgggacacgcacaggtatatctggattaaatatttcaatttatttgataaagagcttaacgaaaaagaaattaaagatctttatgacaatcagagcaattcaggtattctcaaggacttttggggtgattatttgcaatacgacaaaccgtattacatgttgaatttatatgacccgaacaaatatgtagacgtaaataacgtcgggatccggggctatatgtacctcaaagggccgcgcggctcggtcatgacaacgaatatctatttaaattcctctctttatcgcggaacgaaatttatcattaagaaatacgcgagcggaaacaaagataatattgttcgcaataacgacagagtttatattaacgttgtcgttaagaacaaagaatatcgcttggcaacaaacgcgtcccaagctggagtcgaaaaaatcctttcggctttggaaatcccggatgtaggcaacctctcgcaagtagtggttatgaaatccaaaaacgatcagggcatcaccaataaatgtaagatgaatttacaggacaataacggaaacgatattggcttcatcggatttcatcagtttaataacatcgctaaactggttgcgtctaattggtataatcgccaaatcgaacgctcgtcccggaccctgggctgtagctgggaatttattccggtcgatgatggttggggagaacgtcctctttaa

SEQ ID NO: 13 - DNA, 3891 bp, Artificial Sequence
  BoNT/A, B. subtilis-modified 1
atgccatttgtcaataaacagtttaactataaggatcctgttaacggagtcgatattgcatatattaaaatacctaatgcaggccagatgcaacctgtcaaagccttcaaaatccataacaaaatctgggtcatcccggaacgggatacatttacgaaccctgaagagggggatctgaacccgcctccggaagcgaagcaagttcctgtgagctactatgatagcacatatctgtctacggataatgaaaaggataattatctcaaaggtgttaccaagctttttgaacggatatactcgaccgacctcggacggatgttgctgacatctatcgtgagaggcattcctttttggggtggctctacaattgacactgaattaaaggtcatcgatactaactgtattaatgttattcagcctgatggatcctaccgtagtgaagagttgaacttagtaataattgggccctcggccgacattatccagttcgagtgcaaaagcttcggtcatgaggttctgaatttaacacgtaacggctatggctcaacacagtatatccgattctctccagatttcacctttgggttcgaagagagcctggaggtagatacgaacccgttgttaggagcggggaaattcgcgacggatccagccgtgacacttgcccatgaattaatccacgcaggccatcgtctttatggaatcgcaattaaccccaaccgtgtctttaaagtaaacactaatgcctattacgaaatgtcagggctggaagtctcgtttgaggaacttcggacgttcggcggacacgacgcaaagtttattgatagccttcaagagaacgaatttcgtctttattactataataaatttaaagacatcgccagcacactaaataaagcgaaatccatcgtaggcacgacagctagccttcaatacatgaaaaacgtgtttaaagagaagtacctgcttagcgaggatacgagcgggaaatttagcgtcgataagctgaaatttgataaactctataaaatgctaacagaaatttatacagaggataattttgtgaaattctttaaggtcttaaatagaaaaacataccttaactttgataaggcggtgtttaagattaacatcgtaccgaaagttaactacaccatctatgatggatttaacttaagaaacacaaatttggctgcaaattttaatggccagaacaccgaaattaacaatatgaatttcaccaaactcaaaaattttacgggactgtttgagttctataaattgctatgcgttagaggtatcataacgagcaaaaccaaatcgctggacaagggctacaacaaagctctgaatgatctttgtattaaagtgaataactgggatcttttcttttcaccctccgaagataacttcactaacgatttaaataaaggagaagagatcacgagtgatactaatattgaagcggctgaagagaatatcagtcttgacttaatccaacagtattacctgacatttaacttcgataacgaacctgaaaacatcagcatcgaaaacttgagttcagacattatcggccagctggaattaatgccgaatatcgaaaggttcccgaatggcaaaaagtatgagctggataaatacacaatgtttcactatcttcgcgcgcaggaatttgagcatggaaaatcgagaatcgcgcttactaattccgtcaatgaagctctacttaatccatctcgtgtatatacgtttttctcatctgattatgtgaagaaagtgaacaaagcaacagaagctgccatgtttcttggatgggtagaacaacttgtttatgacttcacagacgaaacgtcggaagtatcaaccacagataaaattgcggacataacaattatcattccgtatattggcccggcccttaacattggcaacatgctatataaggatgactttgttggtgcactgatttttagtggtgctgtaatcttgctcgaatttattccggagatcgctattccggttcttgggacatttgctctggtttcatatattgcgaataaagtcttgactgttcagactattgataatgcattgtcaaaacgcaatgaaaaatgggacgaagtttataaatatattgtaactaattggttggctaaagtaaacacgcaaattgaccttattaggaaaaagatgaaagaggccctagaaaatcaagccgaagctaccaaagctataatcaattatcagtacaatcaatacacagaagaggaaaaaaacaatattaattttaatattgatgacttgtctagcaagcttaacgaaagcattaataaagcaatgattaacatcaacaagtttttgaaccaatgctcggtctcatatttgatgaattcaatgatcccgtacggtgttaaacgtttggaagattttgacgcgagcttaaaagacgccttactcaaatacatttacgacaatcgcggtacgctgattggccaagtagatcggcttaaagacaaagtgaacaatacgctctccaccgatataccattccaattatctaagtatgttgacaaccaaagactgttgtctacatttacagaatacatcaaaaacataattaacacaagtattctcaatctgcgctatgagagcaaccacctgatcgacttaagtcggtacgctagcaagattaatattggatctaaagttaatttcgatccgatcgataaaaatcagatacagttgttcaacctcgaatcatctaagattgaggtgattttaaagaacgcaatcgtttacaattcgatgtatgaaaatttttccacgagtttttggatcagaatccctaagtatttcaattcaatttccctgaacaatgaatacactattatcaattgtatggaaaacaattccggttggaaggtgagcctgaattatggagaaatcatttggacattacaagacacccaagaaattaagcagagagttgtcttcaagtactctcaaatgatcaatatatcagattatattaataggtggatattcgtgacgatcacgaataaccgacttaataactccaaaatctacataaatggccggctcattgatcagaaaccaatttccaacctcggtaatattcatgcatccaataacatcatgtttaagttagacggatgcagagatacgcatagatatatttggattaaatactttaacctttttgataaagaacttaatgaaaaagaaataaaggatctgtacgacaaccaatctaactcaggaatccttaaagatttttggggggactatttgcaatacgacaaaccgtattatatgttaaacctgtatgacccgaataaatatgtagatgtcaacaatgttggcatccgtggttatatgtatttaaaaggcccgcgcggctcagtgatgacaactaatatttatcttaattctagcttatatcgaggaacaaagtttattataaaaaagtatgcatctggcaacaaagataacattgtccgcaacaatgatagagtctatattaatgtggtagtcaaaaataaagaatatcgcttagcaacaaatgcgtcacaggctggggtggaaaaaattttaagtgcgctggagattcctgatgttggaaatttgtctcaagtggttgtgatgaaatctaaaaatgatcagggcattacaaataagtgcaaaatgaacttacaagataataacggcaatgatattgggtttatcggttttcatcagtttaataatatcgcaaaactggtggcgtcaaattggtataatcgacagattgaacgctcgtcacgcaccctgggatgttcatgggagtttataccagtcgacgatggatggggagagaggccgctctaa

SEQ ID NO: 14 - DNA, 3891 bp, Artificial Sequence
  BoNT/A, B. subtilis-modified 2
atgccgtttgttaataaacaatttaattataaagatccggttaatggcgttgatattgcatatattaaaattccgaatgcaggccaaatgcaaccggttaaagcatttaaaattcataataaaatttgggttattccggaaagagatacatttacaaatccggaagaaggcgatcttaatccgccgccggaagcaaaacaagttccggttagctattatgatagcacatatcttagcacagataatgaaaaagataattatcttaaaggcgttacaaaactttttgaaagaatttatagcacagatcttggcagaatgcttcttacaagcattgttagaggcattccgttttggggcggcagcacaattgatacagaacttaaagttattgatacaaattgcattaatgttattcaaccggatggcagctatagaagcgaagaacttaatcttgttattattggcccgagcgcagatattattcaatttgaatgcaaaagctttggccatgaagttcttaatcttacaagaaatggctatggcagcacacaatatattagatttagcccggattttacatttggctttgaagaaagccttgaagttgatacaaatccgcttcttggcgcaggcaaatttgcaacagatccggcagttacacttgcacatgaacttattcatgcaggccatagactttatggcattgcaattaatccgaatagagtttttaaagttaatacaaatgcatattatgaaatgagcggccttgaagttagctttgaagaacttagaacatttggcggccatgatgcaaaatttattgatagccttcaagaaaatgaatttagactttattattataataaatttaaagatattgcaagcacacttaataaagcaaaaagcattgttggcacaacagcaagccttcaatatatgaaaaatgtttttaaagaaaaatatcttcttagcgaagatacaagcggcaaatttagcgttgataaacttaaatttgataaactttataaaatgcttacagaaatttatacagaagataattttgttaaattttttaaagttcttaatagaaaaacatatcttaattttgataaagcagtttttaaaattaatattgttccgaaagttaattatacaatttatgatggctttaatcttagaaatacaaatcttgcagcaaattttaatggccaaaatacagaaattaataatatgaattttacaaaacttaaaaattttacaggcctttttgaattttataaacttctttgcgttagaggcattattacaagcaaaacaaaaagccttgataaaggctataataaagcacttaatgatctttgcattaaagttaataattgggatcttttttttagcccgagcgaagataattttacaaatgatcttaataaaggcgaagaaattacaagcgatacaaatattgaagcagcagaagaaaatattagccttgatcttattcaacaatattatcttacatttaattttgataatgaaccggaaaatattagcattgaaaatcttagcagcgatattattggccaacttgaacttatgccgaatattgaaagatttccgaatggcaaaaaatatgaacttgataaatatacaatgtttcattatcttagagcacaagaatttgaacatggcaaaagcagaattgcacttacaaatagcgttaatgaagcacttcttaatccgagcagagtttatacattttttagcagcgattatgttaaaaaagttaataaagcaacagaagcagcaatgtttcttggctgggttgaacaacttgtttatgattttacagatgaaacaagcgaagttagcacaacagataaaattgcagatattacaattattattccgtatattggcccggcacttaatattggcaatatgctttataaagatgattttgttggcgcacttatttttagcggcgcagttattcttcttgaatttattccggaaattgcaattccggttcttggcacatttgcacttgttagctatattgcaaataaagttcttacagttcaaacaattgataatgcacttagcaaaagaaatgaaaaatgggatgaagtttataaatatattgttacaaattggcttgcaaaagttaatacacaaattgatcttattagaaaaaaaatgaaagaagcacttgaaaatcaagcagaagcaacaaaagcaattattaattatcaatataatcaatatacagaagaagaaaaaaataatattaattttaatattgatgatcttagcagcaaacttaatgaaagcattaataaagcaatgattaatattaataaatttcttaatcaatgcagcgttagctatcttatgaatagcatgattccgtatggcgttaaaagacttgaagattttgatgcaagccttaaagatgcacttcttaaatatatttatgataatagaggcacacttattggccaagttgatagacttaaagataaagttaataatacacttagcacagatattccgtttcaacttagcaaatatgttgataatcaaagacttcttagcacatttacagaatatattaaaaatattattaatacaagcattcttaatcttagatatgaaagcaatcatcttattgatcttagcagatatgcaagcaaaattaatattggcagcaaagttaattttgatccgattgataaaaatcaaattcaactttttaatcttgaaagcagcaaaattgaagttattcttaaaaatgcaattgtttataatagcatgtatgaaaattttagcacaagcttttggattagaattccgaaatattttaatagcattagccttaataatgaatatacaattattaattgcatggaaaataatagcggctggaaagttagccttaattatggcgaaattatttggacacttcaagatacacaagaaattaaacaaagagttgtttttaaatatagccaaatgattaatattagcgattatattaatagatggatttttgttacaattacaaataatagacttaataatagcaaaatttatattaatggcagacttattgatcaaaaaccgattagcaatcttggcaatattcatgcaagcaataatattatgtttaaacttgatggctgcagagatacacatagatatatttggattaaatattttaatctttttgataaagaacttaatgaaaaagaaattaaagatctttatgataatcaaagcaatagcggcattcttaaagatttttggggcgattatcttcaatatgataaaccgtattatatgcttaatctttatgatccgaataaatatgttgatgttaataatgttggcattagaggctatatgtatcttaaaggcccgagaggcagcgttatgacaacaaatatttatcttaatagcagcctttatagaggcacaaaatttattattaaaaaatatgcaagcggcaataaagataatattgttagaaataatgatagagtttatattaatgttgttgttaaaaataaagaatatagacttgcaacaaatgcaagccaagcaggcgttgaaaaaattcttagcgcacttgaaattccggatgttggcaatcttagccaagttgttgttatgaaaagcaaaaatgatcaaggcattacaaataaatgcaaaatgaatcttcaagataataatggcaatgatattggctttattggctttcatcaatttaataatattgcaaaacttgttgcaagcaattggtataatagacaaattgaaagaagcagcagaacacttggctgcagctgggaatttattccggttgatgatggctggggcgaaagaccgctttaa

SEQ ID NO: 15 - DNA, 3891 bp, Artificial Sequence
  BoNT/A, B. subtilis-modified 3
atgccttttgtaaataagcagtttaattataaggatccggtgaacggcgtggatattgcttatattaaaattccgaacgcgggtcaaatgcaaccggtaaaagcatttaaaatccataataaaatttgggtcattccggaaagagacacctttacaaatccggaagagggggatctgaaccctccgccagaagccaaacaggtgcctgtatcatattacgatagtacctatttatctacggacaatgaaaaagataattatcttaaaggcgttacaaaactttttgaacggatttattccacggatctggggcgcatgctccttacatccattgtcagaggtattccgttttggggaggctcgacaatcgatactgaactgaaggttatcgacacaaattgcattaacgtcatccagcctgatggcagctacagaagtgaagagcttaatttggtgattatcggcccttcagctgatattatccaattcgaatgcaaaagcttcgggcatgaagtcttgaatcttaccaggaacggctatggttctacacagtatattcgctttagccctgattttacatttggatttgaagagtcgcttgaagttgacacaaatccgttactgggcgcaggaaaattcgcgacggatccggcggtaacccttgcacacgaattaattcatgcgggacatcgcctctacggaattgctatcaaccctaatagagtgttcaaggttaatacgaatgcttactatgagatgagcggcttggaggtgagcttcgaagagttacggacatttggcggtcatgatgcgaaatttattgatagcttgcaagagaacgaatttaggttgtattactataacaaatttaaagacattgcatcgaccttaaataaggcgaaatccatcgtgggaacaactgcatcgcttcagtacatgaaaaacgtttttaaagagaagtatttattgtcagaggacacttctggaaaattttcagtcgataaactgaagttcgataaattatataaaatgcttacggaaatttacacggaggacaattttgttaaatttttcaaagtgcttaatcggaaaacatacctcaactttgataaggccgtttttaaaattaatatcgttccgaaagtcaattatacaatctatgatgggtttaatcttagaaacactaacctcgcagccaatttcaacggtcaaaatactgaaattaataacatgaactttacgaaacttaaaaattttactggattgttcgagttctacaagctgttgtgtgtccgaggaatcattacaagcaagacaaaaagtttggataagggatataacaaagctttgaatgatctctgtattaaagttaacaattgggacctgttcttttcgccatcggaagataatttcaccaatgatcttaacaaaggcgaagagatcacttcagatacaaatattgaggcagcggaagagaacatctctctggatcttattcagcaatattaccttacgttcaatttcgataatgagccggagaatatttctatcgaaaatttgagctcagatattatcggacaacttgaactgatgcctaatattgaacgtttccctaacggtaaaaagtacgaactggacaaatacacaatgttccactaccttagagctcaggaatttgaacacggcaaatcacgcattgcgctcacaaacagtgtcaacgaagcgttattgaatccgtcccgcgtgtatacgttctttagctcagattatgtgaaaaaggtcaacaaagccacagaagcagccatgtttcttggttgggtggaacaactcgtctatgactttacggacgaaactagtgaagtgagcactacggataaaatcgcagatattacaatcattatcccatacatcggtccggctttgaatattggcaacatgctgtataaggatgactttgttggtgctttgatcttttctggcgccgttattctgttggaatttattccagaaattgctattccagtccttgggacgtttgccttagttagttatattgcgaataaagtactcacggtacagacaattgataacgcattatccaagagaaacgagaaatgggatgaggtctataagtatattgtaacaaattggctggcgaaagtcaacactcaaatcgacctcatccgtaagaaaatgaaagaagcgcttgagaaccaagccgaggctacaaaagcaatcattaattaccagtacaatcagtataccgaggaagagaaaaataacatcaatttcaacattgacgatctttcctctaaacttaatgagtctattaataaagcgatgattaatatcaataagttcctgaaccaatgcagcgtatcttacctgatgaactcaatgatcccgtatggcgttaaaagattagaagactttgatgcatcactgaaagacgccctgttgaagtatatttacgataacagaggcacattaatcggacaggttgatagactgaaagataaagtgaataacacattgtctaccgacattccatttcaattatctaaatatgttgataatcaaaggcttttatctacatttacggagtatattaagaatattatcaatacgtccatcttaaacctgcgttatgaatccaaccatctgattgatctgtcccgctacgcctctaagattaacattgggtctaaagtgaatttcgaccctatcgataaaaatcaaattcagctctttaacttggaaagttcaaaaatcgaagttattcttaaaaatgcaattgtatataactcaatgtatgaaaactttagcacgtcattttggattcgtattccgaagtattttaatagcatcagcctcaataacgaatacacaattatcaactgcatggaaaataactctgggtggaaagtcagtctgaattatggcgaaattatctggaccctgcaggacacacaggaaattaagcagcgagtagtgtttaaatactcacaaatgattaatatcagcgactacatcaaccggtggatctttgtaaccattacaaacaatagattaaacaattcaaaaatctacatcaatggacgtcttattgatcaaaaaccgattagtaaccttggaaacattcacgcttcgaacaatattatgttcaaattagacggatgtcgcgatacgcatcggtatatctggattaaatattttaatctgtttgataaagaacttaatgaaaaagaaattaaagacctttatgacaatcaatccaactcaggcattcttaaggatttctggggtgattatttacagtatgataagccttattacatgcttaacttatatgatccgaacaaatatgtggatgttaacaatgtcggcattcgtggatatatgtatcttaagggcccgcgcgggtcagtaatgacgactaacatttatctgaacagctctctttatagggggacaaagtttattatcaaaaagtatgccagcggaaacaaagacaacatcgtccgtaataacgatcgagtctatattaatgtggttgtcaaaaacaaggaataccggctcgctaccaacgcatcgcaggcaggagttgaaaaaattttaagcgctcttgaaattccggacgtaggtaatttatctcaagttgtggttatgaagtcgaaaaatgaccagggaattacgaataagtgcaaaatgaatctgcaagacaataacggaaatgatattgggttcatcggctttcatcaatttaataatattgctaaactggtagcgtcaaattggtacaatcgccagatcgaacggagctcacgaaccttaggttgttcctgggaatttattccggtggatgacggctggggcgaacgtccattataa

SEQ ID NO: 16 - DNA, 3891 bp, Artificial Sequence
  BoNT/A, C. crescentus-modified 1
atgcctttcgttaacaagcagtttaactacaaggaccccgtcaacggcgtcgacatcgcctatatcaagatcccgaacgccggccaaatgcagccggtgaaggcgttcaagattcacaacaagatttgggtgatacccgagcgcgacacgttcacaaacccggaggaaggcgatctgaacccaccgcccgaggccaagcaggtgccggtgagctattacgacagcacgtacctgagcaccgacaacgagaaggacaattatctgaagggcgtcaccaagctgttcgaaagaatctacagcacggacctgggtcgcatgctgcttaccagcatcgtgcgcggcatcccgttctggggcggatccaccatcgacacggagctcaaagtcatcgacacgaactgcatcaacgtcatccagccggacggctcgtatcgctccgaagagttgaacctggtgatcattggcccctccgccgacatcattcagtttgagtgcaagtcgttcggccacgaggtcctgaatctcacccgaaatggctatggcagcacccagtacatccgcttctcgccggacttcaccttcggcttcgaggaatccctggaggtcgacacgaacccgctgctcggcgccggcaagttcgccaccgacccggccgtgaccctcgcccacgaactgatccacgcgggccatcgtctgtacggcatcgccatcaaccccaatcgcgtgttcaaggtgaacaccaacgcctactatgaaatgtcaggcctcgaagtctcgttcgaggaactgcggaccttcgggggccatgatgccaagttcatcgactcgctgcaagagaacgagttccggctgtattactataacaagttcaaggatatcgccagtaccctgaacaaggcgaagtcgatcgtcggcaccacggcgagcctgcagtacatgaagaacgtgttcaaggaaaagtatctgttgtccgaggacaccagcggaaagttctccgttgataagctcaagtttgacaagctgtacaagatgttgaccgagatctacacggaggataactttgtgaagttctttaaagtcctgaatcgtaagacgtacctcaacttcgacaaggccgtgttcaagatcaacatcgtgcccaaggtcaactatactatctatgatggcttcaacctgcgaaatacgaacctcgcggccaatttcaacggccagaataccgagatcaacaatatgaacttcacgaagctgaaaaacttcaccgggctgttcgagttctacaagctgctctgcgttcgcggcatcattacctcgaagacgaaaagcctcgacaagggctataacaaagccctaaacgacctgtgcatcaaggtcaataactgggacctgttcttttcgccgtcggaggataacttcacgaacgacctgaataagggggaggaaatcacctcggacaccaacatcgaggccgcggaggaaaacatctccctggacctgatccagcaatactatctgacgttcaatttcgacaacgagcccgagaacatctcgatcgagaacctgagctcggacatcattggccagctggaactgatgcccaacatcgagcggttcccgaacggcaagaaatacgaactggacaagtacacgatgttccactatctgcgggcgcaggagttcgagcatggcaagtctcggatcgccctgacaaacagcgtcaacgaggccctcctgaatccctcgcgcgtgtataccttctttagctcagattacgttaagaaagtgaacaaggccaccgaggccgcgatgttcttgggatgggtcgaacagctggtgtatgacttcacggacgagacctcggaggtgtccacgaccgataagatcgccgacatcaccatcattatcccgtatatcggtccggctctgaacatcggcaacatgctgtataaggatgacttcgtcggcgctctgatcttctcgggcgccgtcatcctgctcgagttcatcccggagatcgcgatccccgtgctgggcaccttcgccctggtctcgtatatcgcgaacaaggtcctcaccgtccagaccatcgacaatgccctgtccaagcgcaacgagaagtgggacgaagtctataagtacatcgtcactaactggctggcgaaggttaacacccagatcgacctgatccgcaagaaaatgaaggaggccttggagaatcaagcggaagcgaccaaggccatcattaactaccagtataatcaatacacggaggaagagaagaataacatcaacttcaacatcgacgatctgtcgagcaagctaaacgaatccatcaacaaggccatgatcaacatcaacaagttcctgaaccagtgctctgtgagctatctgatgaacagcatgatcccctacggggtcaagcgcctggaggacttcgacgcctcgctcaaggatgccctgttgaagtatatctacgacaaccgtggcaccttgatcggccaggtggaccgtcttaaggacaaggtcaataacaccctgtctacggacatcccgttccagctgtcgaagtacgtcgacaaccagcggctgctctcgaccttcaccgagtacatcaagaacatcataaacacctcgatccttaatctgcgctatgaaagcaaccacctcatcgacctgagccgttatgcctcgaagatcaatatcgggagcaaggtcaacttcgatcccatcgacaagaaccagatccagctgttcaacctcgagagctcgaagatcgaggtcatcctgaagaacgcaatcgtctacaactccatgtatgagaacttttcgaccagcttctggatccgcatcccgaagtacttcaactcgatcagcctgaacaatgagtataccatcatcaattgcatggagaacaatagcgggtggaaggtgtcccttaactacggcgagatcatctggaccctgcaggatacgcaggagatcaagcagcgcgtcgtgttcaagtactcacagatgatcaacatcagcgactacatcaatcgctggatcttcgtgaccatcacgaacaatcgccttaacaattcgaagatctatatcaacggtcgcctgatcgatcagaagcccatctcgaacctgggcaatatccacgcgtcgaacaacatcatgttcaagctggacggctgccgcgacacgcaccggtatatctggatcaagtacttcaacttgttcgacaaggagctgaacgaaaaggagatcaaggacctgtatgacaaccagtccaacagcggcatcctgaaggacttctggggcgactacctgcagtacgacaagccgtattacatgctgaacctgtatgacccgaacaagtacgtcgatgtgaacaacgtcggcatccgcggttatatgtacctgaagggtccaaggggtagtgtaatgaccaccaacatctacctgaactcgagcctttaccgcgggaccaagttcatcatcaagaagtacgcctcgggcaacaaggataacatcgtccgcaacaacgaccgcgtctacatcaacgtcgtggtcaagaacaaggagtaccgcctggcgaccaacgcgtcgcaggcgggcgtcgaaaagatcctgtcggcgctggaaatccctgacgtggggaacctgtcccaggtggtcgtgatgaagagcaagaacgaccagggcatcaccaacaagtgtaagatgaacctccaggacaacaacggcaacgacatcggtttcatcggcttccatcagttcaacaacatcgccaagcttgtggctagcaactggtataaccgccagatcgagcggtcgtcgcgcaccctgggctgctcgtgggagttcatcccggtcgacgatggctggggcgagcggccgctctaa

SEQ ID NO: 17 - DNA, 3891 bp, Artificial Sequence
  BoNT/A, C. crescentus-modified 2
atgccgttcgtcaacaagcagttcaactacaaggacccggtcaacggcgtcgacatcgcctacatcaagatcccgaacgccggccagatgcagccggtcaaggccttcaagatccacaacaagatctgggtcatcccggagcgcgacaccttcaccaacccggaggagggcgacctgaacccgccgccggaggccaagcaggtcccggtctcgtactacgactcgacctacctgtcgaccgacaacgagaaggacaactacctgaagggcgtcaccaagctgttcgagcgcatctactcgaccgacctgggccgcatgctgctgacctcgatcgtccgcggcatcccgttctggggcggctcgaccatcgacaccgagctgaaggtcatcgacaccaactgcatcaacgtcatccagccggacggctcgtaccgctcggaggagctgaacctggtcatcatcggcccgtcggccgacatcatccagttcgagtgcaagtcgttcggccacgaggtcctgaacctgacccgcaacggctacggctcgacccagtacatccgcttctcgccggacttcaccttcggcttcgaggagtcgctggaggtcgacaccaacccgctgctgggcgccggcaagttcgccaccgacccggccgtcaccctggcccacgagctgatccacgccggccaccgcctgtacggcatcgccatcaacccgaaccgcgtcttcaaggtcaacaccaacgcctactacgagatgtcgggcctggaggtctcgttcgaggagctgcgcaccttcggcggccacgacgccaagttcatcgactcgctgcaggagaacgagttccgcctgtactactacaacaagttcaaggacatcgcctcgaccctgaacaaggccaagtcgatcgtcggcaccaccgcctcgctgcagtacatgaagaacgtcttcaaggagaagtacctgctgtcggaggacacctcgggcaagttctcggtcgacaagctgaagttcgacaagctgtacaagatgctgaccgagatctacaccgaggacaacttcgtcaagttcttcaaggtcctgaaccgcaagacctacctgaacttcgacaaggccgtcttcaagatcaacatcgtcccgaaggtcaactacaccatctacgacggcttcaacctgcgcaacaccaacctggccgccaacttcaacggccagaacaccgagatcaacaacatgaacttcaccaagctgaagaacttcaccggcctgttcgagttctacaagctgctgtgcgtccgcggcatcatcacctcgaagaccaagtcgctggacaagggctacaacaaggccctgaacgacctgtgcatcaaggtcaacaactgggacctgttcttctcgccgtcggaggacaacttcaccaacgacctgaacaagggcgaggagatcacctcggacaccaacatcgaggccgccgaggagaacatctcgctggacctgatccagcagtactacctgaccttcaacttcgacaacgagccggagaacatctcgatcgagaacctgtcgtcggacatcatcggccagctggagctgatgccgaacatcgagcgcttcccgaacggcaagaagtacgagctggacaagtacaccatgttccactacctgcgcgcccaggagttcgagcacggcaagtcgcgcatcgccctgaccaactcggtcaacgaggccctgctgaacccgtcgcgcgtctacaccttcttctcgtcggactacgtcaagaaggtcaacaaggccaccgaggccgccatgttcctgggctgggtcgagcagctggtctacgacttcaccgacgagacctcggaggtctcgaccaccgacaagatcgccgacatcaccatcatcatcccgtacatcggcccggccctgaacatcggcaacatgctgtacaaggacgacttcgtcggcgccctgatcttctcgggcgccgtcatcctgctggagttcatcccggagatcgccatcccggtcctgggcaccttcgccctggtctcgtacatcgccaacaaggtcctgaccgtccagaccatcgacaacgccctgtcgaagcgcaacgagaagtgggacgaggtctacaagtacatcgtcaccaactggctggccaaggtcaacacccagatcgacctgatccgcaagaagatgaaggaggccctggagaaccaggccgaggccaccaaggccatcatcaactaccagtacaaccagtacaccgaggaggagaagaacaacatcaacttcaacatcgacgacctgtcgtcgaagctgaacgagtcgatcaacaaggccatgatcaacatcaacaagttcctgaaccagtgctcggtctcgtacctgatgaactcgatgatcccgtacggcgtcaagcgcctggaggacttcgacgcctcgctgaaggacgccctgctgaagtacatctacgacaaccgcggcaccctgatcggccaggtcgaccgcctgaaggacaaggtcaacaacaccctgtcgaccgacatcccgttccagctgtcgaagtacgtcgacaaccagcgcctgctgtcgaccttcaccgagtacatcaagaacatcatcaacacctcgatcctgaacctgcgctacgagtcgaaccacctgatcgacctgtcgcgctacgcctcgaagatcaacatcggctcgaaggtcaacttcgacccgatcgacaagaaccagatccagctgttcaacctggagtcgtcgaagatcgaggtcatcctgaagaacgccatcgtctacaactcgatgtacgagaacttctcgacctcgttctggatccgcatcccgaagtacttcaactcgatctcgctgaacaacgagtacaccatcatcaactgcatggagaacaactcgggctggaaggtctcgctgaactacggcgagatcatctggaccctgcaggacacccaggagatcaagcagcgcgtcgtcttcaagtactcgcagatgatcaacatctcggactacatcaaccgctggatcttcgtcaccatcaccaacaaccgcctgaacaactcgaagatctacatcaacggccgcctgatcgaccagaagccgatctcgaacctgggcaacatccacgcctcgaacaacatcatgttcaagctggacggctgccgcgacacccaccgctacatctggatcaagtacttcaacctgttcgacaaggagctgaacgagaaggagatcaaggacctgtacgacaaccagtcgaactcgggcatcctgaaggacttctggggcgactacctgcagtacgacaagccgtactacatgctgaacctgtacgacccgaacaagtacgtcgacgtcaacaacgtcggcatccgcggctacatgtacctgaagggcccgcgcggctcggtcatgaccaccaacatctacctgaactcgtcgctgtaccgcggcaccaagttcatcatcaagaagtacgcctcgggcaacaaggacaacatcgtccgcaacaacgaccgcgtctacatcaacgtcgtcgtcaagaacaaggagtaccgcctggccaccaacgcctcgcaggccggcgtcgagaagatcctgtcggccctggagatcccggacgtcggcaacctgtcgcaggtcgtcgtcatgaagtcgaagaacgaccagggcatcaccaacaagtgcaagatgaacctgcaggacaacaacggcaacgacatcggcttcatcggcttccaccagttcaacaacatcgccaagctggtcgcctcgaactggtacaaccgccagatcgagcgctcgtcgcgcaccctgggctgctcgtgggagttcatcccggtcgacgacggctggggcgagcgcccgctgtaa

SEQ ID NO: 18 - DNA, 3891 bp, Artificial Sequence
  BoNT/A, C. crescentus-modified 3
atgccgttcgtgaacaagcagttcaactataaggacccggtgaacggggtggacatcgcctacatcaagatcccgaacgccggccagatgcagccggtcaaggcgttcaagatccataacaagatctgggtgatcccggagcgcgacaccttcaccaacccggaagagggcgacctcaaccccccgcccgaggccaagcaggtcccggtgtcgtattacgactcgacctatctctccaccgacaacgagaaggacaactacctgaagggcgtgaccaagctgttcgagcgcatctactcgaccgacctgggccgcatgctgctcacgagcatcgtccgcggcatcccgttctggggcgggtcgacgatcgacaccgaactgaaggtcatcgacacgaactgcatcaacgtgatccagccggacgggtcgtatcgctcggaagagctgaacctcgtcatcatcggcccgtcggccgacatcatccagttcgaatgcaagagcttcggccatgaggtcctgaacctgacgcgcaacggctatggcagcacccagtatatccgcttcagcccggacttcaccttcggcttcgaggaatccctcgaggtcgacaccaaccccctgctcggcgccggcaagttcgcgacggacccggccgtcacgctggcccatgaactgatccacgcgggccaccgcctgtacggcatcgcgatcaacccgaaccgcgtcttcaaggtcaacacgaacgcctattacgagatgtcgggcctggaggtcagcttcgaggaactgcggaccttcggcgggcacgacgcgaagttcatcgacagcctgcaggagaacgagttccgcctgtactattacaacaagttcaaggacatcgcctcgaccctgaacaaggccaagagcatcgtgggcacgaccgcctcgctgcagtatatgaagaacgtgttcaaggagaagtatctgctctcggaggacacctcgggcaagttctccgtcgacaagctgaagttcgacaagctgtataagatgctgaccgagatctataccgaggacaacttcgtgaagttcttcaaggtcctgaaccgtaagacgtatctgaacttcgacaaggcggtcttcaagatcaacatcgtcccgaaggtcaactataccatctacgacggcttcaacctgcggaacacgaacctggcggccaacttcaacggccagaacacggagatcaacaacatgaacttcaccaagctgaagaacttcacggggctgttcgaattctacaagctgctctgcgtccgtggcatcatcacctcgaagaccaagtcgctggacaagggctacaacaaggccctgaacgacctgtgcatcaaggtcaacaactgggacctgttcttcagcccgagcgaagacaacttcaccaacgacctgaacaagggcgaagagatcaccagcgacaccaacatcgaggccgcggaggaaaacatctcgctggacctgatccagcagtactatctgaccttcaacttcgacaacgagccggagaacatcagcatcgaaaacctgagctcggacatcatcggccagctggagctgatgcccaacatcgagcggttccccaacggcaagaagtacgagctggacaagtataccatgttccactatctgcgggcccaggaattcgagcatggcaagagccgcatcgcgctgaccaactcggtgaacgaggccctgctcaacccgtcgcgcgtgtataccttcttcagctccgactatgtcaagaaggtcaacaaggccaccgaggccgcgatgttcctgggctgggtcgaacagctcgtctacgacttcaccgacgagacgtcggaagtctcgacgaccgacaagatcgccgacatcacgatcatcatcccgtacatcggccccgcgctgaacatcggcaacatgctgtacaaggacgacttcgtgggggccctgatcttctcgggcgcggtgatcctgctcgagttcatcccggagatcgcgatccccgtcctgggcacgttcgccctggtctcctatatcgccaacaaggtcctcaccgtccagaccatcgacaacgccctgtcgaagcgcaacgagaagtgggacgaagtgtacaagtacatcgtcacgaactggctggccaaggtcaacacccagatcgacctgatccggaagaagatgaaggaggccctggagaaccaggccgaggcgaccaaggcgatcatcaactaccagtataaccagtatacggaggaagagaagaacaacatcaacttcaacatcgacgacctgagctcgaagctgaacgagtcgatcaacaaggccatgatcaacatcaacaagttcctgaaccagtgcagcgtcagctacctgatgaacagcatgatcccctacggcgtgaagcgcctggaggacttcgacgcctcgctgaaggacgccctgctcaagtacatctatgacaaccgcggcacgctgatcggccaggtcgaccgcctgaaggacaaggtgaacaacacgctgtcgaccgacatccccttccagctgtccaagtacgtcgacaaccagcgcctgctctccaccttcaccgaatatatcaagaacatcatcaacacgtcgatcctcaacctccgctacgaaagcaaccacctgatcgacctgtcgcgttacgcctcgaagatcaacatcggctcgaaggtcaacttcgacccgatcgacaagaaccagatccagctgttcaacctggagtccagcaagatcgaggtgatcctcaagaacgccatcgtgtataacagcatgtacgagaacttctccacctccttctggatccggatcccgaagtacttcaactccatctcgctgaacaacgagtataccatcatcaactgcatggagaacaactcggggtggaaggtctcgctgaactatggcgagatcatctggaccctccaggacacccaggagatcaagcagcgcgtggtcttcaagtattcgcagatgatcaacatctcggactacatcaaccgttggatcttcgtgaccatcacgaacaaccgtctgaacaactcgaagatctacatcaacggccgcctgatcgaccagaagccgatctcgaacctgggcaacatccacgcgtcgaacaacatcatgttcaagctggacggctgccgcgacacccaccgctatatctggatcaagtatttcaacctgttcgacaaggagctgaacgaaaaggagatcaaggacctgtacgacaaccagagcaacagcggcatcctgaaggacttctggggcgactacctgcagtatgacaagccctactatatgctcaacctgtacgaccccaacaagtatgtcgacgtcaacaacgtgggcatccggggctacatgtacctgaagggcccccgcggctcggtgatgaccaccaacatctacctgaactcgtccctgtaccgcggcaccaagttcatcatcaagaagtacgcgagcggcaacaaggacaacatcgtccgcaacaacgaccgcgtgtacatcaacgtggtcgtgaagaacaaggaataccgcctggccaccaacgcgtcccaggccggcgtggaaaagatcctgagcgccctggagatccccgacgtcgggaacctgtcccaggtggtcgtgatgaagtcgaagaacgaccagggcatcaccaacaagtgcaagatgaacctgcaggacaacaacggcaacgacatcggcttcatcggcttccaccagttcaacaacatcgccaagctggtcgccagcaactggtataaccgccagatcgagcggagctcgcggaccctgggctgctcgtgggagttcatcccggtcgacgacggctggggcgagcgcccgctgtaa

SEQ ID NO: 19 - DNA, 3891 bp, Artificial Sequence
  BoNT/A, C. difficile-modified 1
atgccatttgtaaataaacaatttaactataaggatccagttaatggagttgatattgcatatataaaaattccaaatgctggacagatgcaacctgttaaagcttttaagatacataataaaatctgggtaataccagaaagagatacttttactaatcctgaagagggtgatctaaatccacctccagaggccaagcaagtaccagtttcttattacgattctacatacctctcaactgataatgaaaaagataattatttaaaaggagtaacaaaactttttgagcgcatatattcaacagatttgggcagaatgttactaacttctatcgttagaggaataccattttgggggggatcaacaatagatactgaactaaaagtaattgataccaattgtattaacgtaattcaacctgatggatcttatagatcagaagagttaaacttagtaatcattggcccgtctgcagatataattcaattcgaatgtaaaagttttggtcatgaagttcttaacttgacacgtaacggttatggttcaacacaatatatacgctttagtccagattttacatttggatttgaagagagtctagaggtggacacaaatccacttttaggtgcgggaaaatttgctactgatccagcagtaacattggcacatgagttaatacatgcaggtcaccgtctgtatggtatagccataaatcctaatagagtgtttaaagtgaacacaaatgcttattacgaaatgtctggacttgaagtttcttttgaagagttaagaacttttggagggcatgatgctaaatttattgatagtttacaagaaaacgagtttagattatattactataataaatttaaagatatagcttctactttaaataaagctaaaagtatagtaggaacaactgctagcttacaatatatgaagaacgtattcaaagaaaaatatttacttagtgaagatactagtggtaagttttcagtggataaattgaaatttgataaattatataaaatgcttactgaaatttacaccgaagataatttcgttaaatttttcaaggtcttgaatagaaaaacttatcttaattttgataaggctgtttttaaaattaatatagtacctaaagtaaactatactatttatgatggcttcaatttaagaaatacaaatttagctgcaaattttaatggacaaaatacagaaattaacaatatgaattttactaaattaaaaaattttacaggattgtttgaattttacaaattactttgtgtgcgtggcattataacttctaaaacaaaatcattggataaaggttataataaggcattaaacgatctgtgcataaaagttaataactgggatttatttttctcaccttctgaagataattttactaatgatctaaacaaaggagaagagattacgtctgatactaatatagaagctgcagaagagaatattagtttagatttgattcaacagtattacttaacatttaatttcgataatgaaccagaaaatatatctattgaaaatctatcatccgatataatcggtcaactagaacttatgcctaatatagaaagatttcctaatggaaaaaagtatgaactggataaatacacaatgtttcattacctaagagctcaggaatttgaacatggaaagtccagaatcgcattaactaatagtgtcaatgaagcattacttaatccttcaagggtgtatactttctttagctctgactatgttaaaaaggttaataaagctactgaagctgcaatgtttttgggatgggtagaacagttagtttatgattttactgacgaaacaagtgaagtttcgactacagacaaaatagcggatataactattataatcccttatatagggccagcacttaatattggtaatatgctttataaggatgactttgttggtgctttaatattttcaggtgcagtaattttactagaatttatacccgagattgcaataccagtattgggtacctttgctttagtatcttatatagcaaataaagtattaacagtacaaacgattgataatgcattaagtaaaagaaatgaaaaatgggatgaagtttacaaatatattgtaactaattggttagcaaaagttaatactcaaatagacttaataagaaaaaagatgaaagaagcattagaaaatcaagctgaagctacaaaagcaataattaattatcaatataatcaatatacagaagaggaaaaaaataacattaattttaatatagatgacttatcgtctaaattaaatgaaagtataaataaagcaatgataaatataaataagtttttaaatcaatgtagtgtaagttacttgatgaattcaatgattccatacggtgttaaacgactagaagattttgacgcctctttgaaagatgctttactaaaatatatatatgacaatagaggaactttaataggtcaagttgatagattaaaagataaggtaaataacacattaagcactgatatacctttccaattatctaaatatgtagataatcaaagactgttaagtacgtttactgaatatataaagaatattataaatacttcaatattaaatttacgttatgaatctaatcatcttatagatttaagcagatatgcttctaagattaatattggtagtaaagtaaattttgatcctattgataaaaaccagatacaactctttaatttagaatcaagtaaaatcgaagtaatccttaaaaacgctatagtatataattctatgtatgaaaatttttctacctcattctggataagaataccaaaatattttaactctatatcattaaataacgaatatactataattaattgtatggaaaataactcaggatggaaggtatctttaaattatggtgaaataatttggactcttcaagatacacaagagattaaacaaagagtagtttttaaatatagtcaaatgataaatatatcagattatattaatagatggatattcgtaacaattactaataacagactaaataacagtaaaatatatattaatggtagacttattgatcaaaaaccaatatcaaatctaggaaatatacacgcatccaataacataatgttcaaattagatgggtgtagagacacacatcgatatatttggattaaatattttaatttatttgataaagaattaaatgaaaaagaaataaaagatttatatgataatcaatcaaattcaggaattttaaaagatttttggggtgattatttacaatatgacaagccttattacatgttaaatttatatgacccaaataaatatgttgatgttaataacgtaggtataagaggatatatgtatttaaaaggtcctcgtggatcagttatgacgactaatatatatttaaatagttctttatatagaggaactaagtttataattaagaaatatgctagcggaaataaagataatatagttagaaataatgatagagtttatataaatgtcgtggtaaaaaataaagaatatcgacttgcaacaaatgcatcacaggcaggagttgaaaagatcttatctgcattagaaatacctgatgttggaaatttaagtcaagttgtagttatgaagtctaaaaatgaccaaggaattacaaataaatgcaaaatgaatttgcaggataataatggaaatgatattggttttataggttttcaccaatttaataatattgctaaacttgtcgctagtaattggtataatcgtcaaatagagaggagttcaaggactcttggatgtagttgggaatttattcctgtagatgatggttggggtgaaagacctttataa

SEQ ID NO: 20 - DNA, 3891 bp, Artificial Sequence
  BoNT/A, C. difficile-modified 2
atgccatttgtaaataaacaatttaattataaagatccagtaaatggagtagatatagcatatataaaaataccaaatgcaggacaaatgcaaccagtaaaagcatttaaaatacataataaaatatgggtaataccagaaagagatacttttactaatccagaagaaggagatttaaatccaccaccagaagcaaaacaagtaccagtatcttattatgattctacttatttatctactgataatgaaaaagataattatttaaaaggagtaactaaattatttgaaagaatatattctactgatttaggaagaatgttattaacttctatagtaagaggaataccattttggggaggatctactatagatactgaattaaaagtaatagatactaattgtataaatgtaatacaaccagatggatcttatagatctgaagaattaaatttagtaataataggaccatctgcagatataatacaatttgaatgtaaatcttttggacatgaagtattaaatttaactagaaatggatatggatctactcaatatataagattttctccagattttacttttggatttgaagaatctttagaagtagatactaatccattattaggagcaggaaaatttgcaactgatccagcagtaactttagcacatgaattaatacatgcaggacatagattatatggaatagcaataaatccaaatagagtatttaaagtaaatactaatgcatattatgaaatgtctggattagaagtatcttttgaagaattaagaacttttggaggacatgatgcaaaatttatagattctttacaagaaaatgaatttagattatattattataataaatttaaagatatagcatctactttaaataaagcaaaatctatagtaggaactactgcatctttacaatatatgaaaaatgtatttaaagaaaaatatttattatctgaagatacttctggaaaattttctgtagataaattaaaatttgataaattatataaaatgttaactgaaatatatactgaagataattttgtaaaattttttaaagtattaaatagaaaaacttatttaaattttgataaagcagtatttaaaataaatatagtaccaaaagtaaattatactatatatgatggatttaatttaagaaatactaatttagcagcaaattttaatggacaaaatactgaaataaataatatgaattttactaaattaaaaaattttactggattatttgaattttataaattattatgtgtaagaggaataataacttctaaaactaaatctttagataaaggatataataaagcattaaatgatttatgtataaaagtaaataattgggatttatttttttctccatctgaagataattttactaatgatttaaataaaggagaagaaataacttctgatactaatatagaagcagcagaagaaaatatatctttagatttaatacaacaatattatttaacttttaattttgataatgaaccagaaaatatatctatagaaaatttatcttctgatataataggacaattagaattaatgccaaatatagaaagatttccaaatggaaaaaaatatgaattagataaatatactatgtttcattatttaagagcacaagaatttgaacatggaaaatctagaatagcattaactaattctgtaaatgaagcattattaaatccatctagagtatatacttttttttcttctgattatgtaaaaaaagtaaataaagcaactgaagcagcaatgtttttaggatgggtagaacaattagtatatgattttactgatgaaacttctgaagtatctactactgataaaatagcagatataactataataataccatatataggaccagcattaaatataggaaatatgttatataaagatgattttgtaggagcattaatattttctggagcagtaatattattagaatttataccagaaatagcaataccagtattaggaacttttgcattagtatcttatatagcaaataaagtattaactgtacaaactatagataatgcattatctaaaagaaatgaaaaatgggatgaagtatataaatatatagtaactaattggttagcaaaagtaaatactcaaatagatttaataagaaaaaaaatgaaagaagcattagaaaatcaagcagaagcaactaaagcaataataaattatcaatataatcaatatactgaagaagaaaaaaataatataaattttaatatagatgatttatcttctaaattaaatgaatctataaataaagcaatgataaatataaataaatttttaaatcaatgttctgtatcttatttaatgaattctatgataccatatggagtaaaaagattagaagattttgatgcatctttaaaagatgcattattaaaatatatatatgataatagaggaactttaataggacaagtagatagattaaaagataaagtaaataatactttatctactgatataccatttcaattatctaaatatgtagataatcaaagattattatctacttttactgaatatataaaaaatataataaatacttctatattaaatttaagatatgaatctaatcatttaatagatttatctagatatgcatctaaaataaatataggatctaaagtaaattttgatccaatagataaaaatcaaatacaattatttaatttagaatcttctaaaatagaagtaatattaaaaaatgcaatagtatataattctatgtatgaaaatttttctacttctttttggataagaataccaaaatattttaattctatatctttaaataatgaatatactataataaattgtatggaaaataattctggatggaaagtatctttaaattatggagaaataatatggactttacaagatactcaagaaataaaacaaagagtagtatttaaatattctcaaatgataaatatatctgattatataaatagatggatatttgtaactataactaataatagattaaataattctaaaatatatataaatggaagattaatagatcaaaaaccaatatctaatttaggaaatatacatgcatctaataatataatgtttaaattagatggatgtagagatactcatagatatatatggataaaatattttaatttatttgataaagaattaaatgaaaaagaaataaaagatttatatgataatcaatctaattctggaatattaaaagatttttggggagattatttacaatatgataaaccatattatatgttaaatttatatgatccaaataaatatgtagatgtaaataatgtaggaataagaggatatatgtatttaaaaggaccaagaggatctgtaatgactactaatatatatttaaattcttctttatatagaggaactaaatttataataaaaaaatatgcatctggaaataaagataatatagtaagaaataatgatagagtatatataaatgtagtagtaaaaaataaagaatatagattagcaactaatgcatctcaagcaggagtagaaaaaatattatctgcattagaaataccagatgtaggaaatttatctcaagtagtagtaatgaaatctaaaaatgatcaaggaataactaataaatgtaaaatgaatttacaagataataatggaaatgatataggatttataggatttcatcaatttaataatatagcaaaattagtagcatctaattggtataatagacaaatagaaagatcttctagaactttaggatgttcttgggaatttataccagtagatgatggatggggagaaagaccattataa

SEQ ID NO: 21 - DNA, 3891 bp, Artificial Sequence
  BoNT/A, C. difficile-modified 3
atgccttttgtaaataaacaatttaattataaagatccagtaaatggagtagatatagcatatataaaaattcctaatgcaggtcaaatgcaaccagtaaaagcatttaaaatacataataaaatttgggttattccagaacgtgatacttttacaaatcctgaagaaggagatttaaatcctccacctgaagcaaaacaagtaccagtaagttattatgattcaacttatttaagtacagataatgaaaaagataattatttaaaaggagttactaaactatttgaacgtatatatagtacagatttaggtagaatgttattgacttctatagtaagaggaattccattttggggaggtagtacaatagatactgaactaaaagttattgatacaaattgtattaatgtaatacaaccagatggttcatatagatctgaagaattaaatttagttataattggaccttctgcagatataattcaatttgaatgtaaatcttttggacatgaagtactaaatttaactagaaatggatatggttcaactcaatatattagattttcaccagattttacttttggttttgaagaatctttagaagtagatactaatccattattgggagctggtaaatttgcaactgatcctgctgttactttagcacatgaattaatacatgctggacacagactttatggtattgctattaatcctaatagagtatttaaagtaaatactaatgcatattatgaaatgtctggattagaagtatcttttgaagaattaagaacatttggtggacatgatgctaaatttatagattctttacaagaaaatgaatttagattatattattataataaatttaaagatatagcatctactcttaataaagcaaaatctatagtaggaactacagcttctttacaatatatgaaaaatgtttttaaagaaaaatatttattgtcagaagatacttcaggtaaatttagtgttgataaacttaaatttgataaattgtataaaatgttgacagaaatttatactgaagataattttgttaaattttttaaagtactaaatagaaaaacttatttgaattttgataaagctgtttttaaaattaatatagtaccaaaagtaaattatactatatatgatggttttaatttaagaaatacaaatttagcagctaattttaatggtcaaaatactgaaattaataatatgaattttactaaactaaaaaattttacaggattatttgaattttataaattactttgtgtaagaggaattataactagtaaaacaaaatctttagataaaggatataataaagctttgaatgatttatgtataaaagttaataattgggatttatttttttctccatctgaagataattttacaaatgatttaaataaaggagaagaaataacatctgatacaaatatagaagcagctgaagaaaatataagtcttgatttaattcaacaatattatttaacatttaattttgataatgaacctgaaaatattagtattgaaaatttatcatctgatataattggacaattagaattaatgccaaatatagaaagatttcctaatggaaaaaaatatgaactagataaatatacaatgtttcattatttgagagcacaagaatttgaacacggaaaatcacgtattgctttaacaaattctgttaatgaagcattactaaatccttctagagtttatacttttttttcatctgattatgttaaaaaagtaaataaagcaacagaagcagctatgtttttaggatgggttgaacaattagtttatgattttacagatgaaacttcagaagttagtacaactgataaaattgctgatataactattataattccatatataggaccagctttaaatataggaaatatgttgtataaagatgattttgtaggagcacttattttttctggagctgttatattactagaatttatacctgaaattgctatacctgtacttggtacttttgcacttgtatcttatatagcaaataaagtactaactgtacaaacaatagataatgcattatcaaaaagaaatgaaaaatgggatgaagtttataaatatattgttactaattggttagcaaaagtaaatactcaaatagatttaattagaaaaaaaatgaaagaagctttagaaaatcaagctgaagctactaaagctattataaattatcaatataatcaatatactgaagaagaaaaaaataatataaattttaatatagatgatctttcaagtaaattgaatgaaagtataaataaagcaatgataaatattaataaatttttaaatcaatgtagtgtatcatatcttatgaattctatgattccatatggtgttaaaagattagaagattttgatgcatcacttaaagatgctttgcttaaatatatttatgataatagaggaacattaattggacaagtagatagattaaaagataaagtaaataatactttatctactgatattccatttcaattgtcaaaatatgttgataatcaacgtctactttcaacttttacagaatatataaaaaatattataaatacatcaatactaaatttaagatatgaatctaatcacttaattgatttatctagatatgcaagtaaaataaatataggaagtaaagtaaattttgatccaatagataaaaatcaaattcaattatttaatttagaaagttcaaaaatagaagtaatattaaaaaatgctatagtttataattctatgtatgaaaatttttctacttcattttggattagaatacctaaatattttaatagtatttctcttaataatgaatatactataattaattgtatggaaaataattctggttggaaagttagtttaaattatggtgaaataatttggactttacaagatacacaagaaataaaacaacgtgttgtatttaaatattcacaaatgataaatatatctgattatataaatagatggatttttgtaactataactaataatagacttaataatagtaaaatatatataaatggtagacttatagatcaaaaacctatttctaatttaggaaatatacatgcttctaataatataatgtttaaattggatggttgtagagatacacatagatatatatggataaaatattttaatttatttgataaagaacttaatgaaaaagaaattaaagatttatatgataatcaaagtaattcaggaatattaaaagatttttggggtgattatttacaatatgataaaccttattatatgcttaatctttatgatcctaataaatatgttgatgtaaataatgtaggtataagaggatatatgtatttaaaaggaccaagaggtagtgtaatgactacaaatatatatttaaattctagtttatatagaggaactaaatttataattaaaaaatatgcatcaggtaataaagataatatagtaagaaataatgatagagtatatataaatgtagttgtaaaaaataaagaatatagattagcaactaatgcttctcaagcaggtgtagaaaaaattttatcagcattagaaatacctgatgtaggaaatctaagtcaagttgtagttatgaaatctaaaaatgatcaaggaataactaataaatgtaaaatgaatttacaagataataatggaaatgatataggttttataggttttcatcaatttaataatatagcaaaattagttgcatcaaattggtataatagacaaatagaaagatctagtcgtacattaggatgtagttgggaatttataccagtagatgatggttggggagaaagaccactataa

SEQ ID NO: 22 - DNA, 3891 bp, Artificial Sequence
  BoNT/A, C. perfringens-modified 1
atgccttttgtaaataaacaatttaactataaagatccagttaatggagttgatattgcctatataaaaataccaaatgcagggcaaatgcaaccagtaaaagcttttaagatacacaataaaatctgggttataccagaaagagatacatttacaaaccctgaagagggagaccttaacccacctccagaagcgaaacaagttccagttagttattacgattcaacctatttaagtactgataatgaaaaagataattatttaaagggtgttacaaaattgttcgaaagaatatatagtacagatttgggaagaatgttactaacatctatagttagaggaatacctttttggggtggatcaacaattgatactgaattaaaggttatagatactaattgtatcaatgttatacaaccagatggaagttatcgtagtgaagagctaaatttagttattataggtccatctgctgatataattcaatttgaatgtaaatcatttggacatgaagttttaaatttaactagaaacggttatggaagtacacaatatattagattctcacctgattttacttttggattcgaagagagtcttgaagtggatactaatccacttttaggtgctggaaaatttgctacagatcctgctgtaactttagcacatgaacttatccatgctggacacagattatatggcattgctattaatccaaatagagttttcaaagtaaacactaatgcttattacgaaatgagtggattagaggtatctttcgaagagctaagaacattcggaggtcatgacgctaaatttatagattcactacaagaaaacgagtttagactttattactataataaatttaaagatattgcttcaacacttaataaggctaagagcatagtcggcacaactgcttctttacaatatatgaaaaatgttttcaaagagaaataccttttaagcgaagatacaagcggtaagttttcagttgataaattaaaattcgataaattatataaaatgcttacagaaatatatactgaagataactttgtaaagtttttcaaagtgttaaacagaaagacatatcttaattttgataaagctgtttttaagatcaatattgtgcctaaggtaaattatactatatatgatggattcaatttaagaaatactaatttagctgcaaattttaatggtcaaaatacagagattaataacatgaattttactaaattaaagaattttacgggattatttgaattttataagttactttgtgttaggggaattataacatctaaaacaaaaagtttagacaaaggatataataaagctttaaatgatctttgcataaaagttaataactgggatttatttttctctccatctgaagataattttacaaatgatttaaataaaggagaagagattacatctgatactaatattgaagcagctgaagagaacatatctttagatttaatacaacagtattacctgacttttaattttgataatgagcctgaaaatatttcaattgaaaatttatcatccgatataattggacaattagaattaatgccaaatattgaaagatttccgaatggtaaaaagtatgaattagataagtatactatgtttcattatttaagggcacaagagttcgagcatggaaaatcaagaattgctttaacaaattctgttaatgaagccctattaaatccaagtagagtttatacttttttcagttctgattacgttaaaaaggttaataaagcaactgaagcagctatgtttttaggttgggttgaacagcttgtttatgattttacagatgaaacaagtgaagtttcaactaccgacaaaatagctgacattacaataattataccatatataggtccagctttaaacattggaaatatgttatataaggacgattttgttggagctttaatatttagtggggcagttattttattggaatttataccagaaatagcaataccagttttaggaacatttgcattagtatcttacatagcaaataaggtattaacagttcaaacaatagataatgctctttctaaacgtaatgaaaagtgggatgaagtatataaatacatagttactaactggcttgcaaaagtaaacactcagatagatttaattagaaaaaagatgaaggaagcattagagaatcaagcagaagctactaaagctataattaattatcaatataatcaatatacagaagaggaaaaaaacaatataaattttaatattgatgacttatcaagcaaacttaatgaatcaattaataaagcaatgataaatattaataagtttcttaatcaatgtagtgttagttatttaatgaattcaatgataccatacggagttaagagactagaagattttgatgcatctttaaaagatgcattactaaagtatatatatgataatagaggtactcttataggacaagtagatagattaaaagataaagtaaataacactttatcaactgatataccctttcaattatctaagtatgtggataatcaaagattattgagtacttttactgaatacataaaaaacataattaatacttcaatattaaatcttagatatgaatctaatcatttaatagatttatcaagatatgcttcaaaaataaatattggatctaaggtaaattttgatcctatagataagaatcaaattcaattatttaatttagaatcaagcaaaatagaagttatacttaaaaatgcaatagtatacaattccatgtatgaaaatttttccacatcattttggataagaattcctaaatattttaacagtatttctctaaataacgagtatactataattaattgtatggaaaataactctggatggaaggttagtttaaactatggtgaaataatctggaccttacaggatactcaagaaataaaacaaagagtagtttttaaatattctcagatgataaatattagtgattatataaataggtggatatttgtaactattactaataacagattaaacaattcaaaaatatatataaatggaagacttattgatcaaaaacctatatcaaatttaggtaatattcatgctagcaataacataatgtttaagttggatggatgcagagacactcatagatatatatggataaagtattttaatttatttgataaagaattaaatgaaaaagagataaaagatctttatgacaatcaatctaatagtgggatacttaaagatttttggggagattatttacaatatgataaaccatactatatgttaaatttatatgatcctaataaatatgtagatgttaataatgtaggcataagagggtatatgtatttaaaaggacctagaggatcagtaatgactacaaatatatatttaaatagctctttatatagaggtactaaatttataattaagaaatatgcaagtggaaataaagataatatagtaagaaataatgatagagtatatataaatgtagttgtaaaaaataaggaatatagacttgccaccaatgccagtcaagctggtgtagaaaaaatactaagtgctttagaaatacctgatgttggaaatttaagtcaagtagttgtaatgaaatcaaaaaatgatcaagggataacaaataaatgtaaaatgaatttacaagataataatggaaatgacattggttttataggttttcatcaatttaataatatagcaaaattagtagcttcaaattggtataatagacaaatagaaagatcaagtagaactttaggatgttcatgggaattcattcctgtagatgatggatggggagaaaggcctttataa

SEQ ID NO: 23 - DNA, 3891 bp, Artificial Sequence
  BoNT/A, C. perfringens-modified 2
atgccatttgttaataaacaatttaattataaagatccagttaatggagttgatatagcttatataaaaataccaaatgctggacaaatgcaaccagttaaagcttttaaaatacataataaaatatgggttataccagaaagagatacttttactaatccagaagaaggagatttaaatccaccaccagaagctaaacaagttccagtttcatattatgattcaacttatttatcaactgataatgaaaaagataattatttaaaaggagttactaaattatttgaaagaatatattcaactgatttaggaagaatgttattaacttcaatagttagaggaataccattttggggaggatcaactatagatactgaattaaaagttatagatactaattgtataaatgttatacaaccagatggatcatatagatcagaagaattaaatttagttataataggaccatcagctgatataatacaatttgaatgtaaatcatttggacatgaagttttaaatttaactagaaatggatatggatcaactcaatatataagattttcaccagattttacttttggatttgaagaatcattagaagttgatactaatccattattaggagctggaaaatttgctactgatccagctgttactttagctcatgaattaatacatgctggacatagattatatggaatagctataaatccaaatagagtttttaaagttaatactaatgcttattatgaaatgtcaggattagaagtttcatttgaagaattaagaacttttggaggacatgatgctaaatttatagattcattacaagaaaatgaatttagattatattattataataaatttaaagatatagcttcaactttaaataaagctaaatcaatagttggaactactgcttcattacaatatatgaaaaatgtttttaaagaaaaatatttattatcagaagatacttcaggaaaattttcagttgataaattaaaatttgataaattatataaaatgttaactgaaatatatactgaagataattttgttaaattttttaaagttttaaatagaaaaacttatttaaattttgataaagctgtttttaaaataaatatagttccaaaagttaattatactatatatgatggatttaatttaagaaatactaatttagctgctaattttaatggacaaaatactgaaataaataatatgaattttactaaattaaaaaattttactggattatttgaattttataaattattatgtgttagaggaataataacttcaaaaactaaatcattagataaaggatataataaagctttaaatgatttatgtataaaagttaataattgggatttatttttttcaccatcagaagataattttactaatgatttaaataaaggagaagaaataacttcagatactaatatagaagctgctgaagaaaatatatcattagatttaatacaacaatattatttaacttttaattttgataatgaaccagaaaatatatcaatagaaaatttatcatcagatataataggacaattagaattaatgccaaatatagaaagatttccaaatggaaaaaaatatgaattagataaatatactatgtttcattatttaagagctcaagaatttgaacatggaaaatcaagaatagctttaactaattcagttaatgaagctttattaaatccatcaagagtttatacttttttttcatcagattatgttaaaaaagttaataaagctactgaagctgctatgtttttaggatgggttgaacaattagtttatgattttactgatgaaacttcagaagtttcaactactgataaaatagctgatataactataataataccatatataggaccagctttaaatataggaaatatgttatataaagatgattttgttggagctttaatattttcaggagctgttatattattagaatttataccagaaatagctataccagttttaggaacttttgctttagtttcatatatagctaataaagttttaactgttcaaactatagataatgctttatcaaaaagaaatgaaaaatgggatgaagtttataaatatatagttactaattggttagctaaagttaatactcaaatagatttaataagaaaaaaaatgaaagaagctttagaaaatcaagctgaagctactaaagctataataaattatcaatataatcaatatactgaagaagaaaaaaataatataaattttaatatagatgatttatcatcaaaattaaatgaatcaataaataaagctatgataaatataaataaatttttaaatcaatgttcagtttcatatttaatgaattcaatgataccatatggagttaaaagattagaagattttgatgcttcattaaaagatgctttattaaaatatatatatgataatagaggaactttaataggacaagttgatagattaaaagataaagttaataatactttatcaactgatataccatttcaattatcaaaatatgttgataatcaaagattattatcaacttttactgaatatataaaaaatataataaatacttcaatattaaatttaagatatgaatcaaatcatttaatagatttatcaagatatgcttcaaaaataaatataggatcaaaagttaattttgatccaatagataaaaatcaaatacaattatttaatttagaatcatcaaaaatagaagttatattaaaaaatgctatagtttataattcaatgtatgaaaatttttcaacttcattttggataagaataccaaaatattttaattcaatatcattaaataatgaatatactataataaattgtatggaaaataattcaggatggaaagtttcattaaattatggagaaataatatggactttacaagatactcaagaaataaaacaaagagttgtttttaaatattcacaaatgataaatatatcagattatataaatagatggatatttgttactataactaataatagattaaataattcaaaaatatatataaatggaagattaatagatcaaaaaccaatatcaaatttaggaaatatacatgcttcaaataatataatgtttaaattagatggatgtagagatactcatagatatatatggataaaatattttaatttatttgataaagaattaaatgaaaaagaaataaaagatttatatgataatcaatcaaattcaggaatattaaaagatttttggggagattatttacaatatgataaaccatattatatgttaaatttatatgatccaaataaatatgttgatgttaataatgttggaataagaggatatatgtatttaaaaggaccaagaggatcagttatgactactaatatatatttaaattcatcattatatagaggaactaaatttataataaaaaaatatgcttcaggaaataaagataatatagttagaaataatgatagagtttatataaatgttgttgttaaaaataaagaatatagattagctactaatgcttcacaagctggagttgaaaaaatattatcagctttagaaataccagatgttggaaatttatcacaagttgttgttatgaaatcaaaaaatgatcaaggaataactaataaatgtaaaatgaatttacaagataataatggaaatgatataggatttataggatttcatcaatttaataatatagctaaattagttgcttcaaattggtataatagacaaatagaaagatcatcaagaactttaggatgttcatgggaatttataccagttgatgatggatggggagaaagaccattataa

SEQ ID NO: 24 - DNA, 3891 bp, Artificial Sequence
  BoNT/A, C. perfringens-modified 3
atgccatttgttaataagcaatttaattataaagatcctgttaatggagttgatattgcatatattaagatacctaatgcaggtcaaatgcaaccagttaaggcatttaagattcataataaaatatgggtaatacctgaaagagatacttttactaatcctgaagaaggtgatttaaatcctccacctgaagcaaaacaagtaccagtatcttattatgattctacttatcttagtactgataatgaaaaagataattatcttaagggtgttacaaaattatttgaaagaatatatagtactgatttaggaagaatgttacttacaagtattgtaagaggtatacctttttggggaggtagtacaatagatacagaattaaaagttatagatacaaattgtataaatgttatacaaccagatggaagttatagaagtgaagaattaaatttagtaataattggtcctagcgcagatataattcaatttgaatgtaaatcttttggacatgaagttctaaatttaacaagaaatggatatggatctactcaatatattagatttagccctgattttacatttggttttgaagaatctttagaagttgatacaaatccattacttggagctggaaaatttgctactgatcctgcagttactctagctcatgaactaatacatgctggacatagattatatggaatagctataaatccaaatagggtttttaaagtaaatactaatgcttattatgaaatgtcaggattagaagtttcttttgaagaacttagaacttttggaggtcatgatgctaagtttattgatagtttacaagaaaatgaatttagactatattattataataaatttaaagatattgcttcaacattaaataaagctaaaagcatagttggaacaactgcttcattacaatatatgaaaaatgtatttaaggaaaaatatttactttcagaagatacatctggaaaattttcagtagataaattaaaatttgataagttatataagatgttaacagaaatatatactgaagataattttgtaaaattttttaaagttttaaatagaaaaacatatttaaattttgataaagctgtttttaaaataaatatagttccaaaagtaaattatacaatatatgatggttttaatttaagaaatacaaatttagcagctaattttaatggacaaaatactgaaattaataatatgaattttacaaagttaaaaaattttacaggattatttgaattttataaattactatgtgtaagaggtataattacatcaaagactaaatctttagataaaggatataataaagctttaaatgatttatgtattaaggttaataattgggatttatttttttcaccatctgaagataattttacaaatgatttaaataaaggagaagaaataactagtgatacaaatattgaagcagctgaagaaaatattagtttagatcttatacaacaatattatcttacatttaattttgataatgaaccagaaaatatatctatagaaaatttaagttcagatataattggacaattagaacttatgcctaatatagaaagatttcctaatggtaaaaagtatgaacttgataaatatactatgtttcattatctaagagcacaagaatttgaacatggaaaaagcagaattgcattaactaattcagttaatgaagctttactaaatccatcaagagtttatacatttttttcatctgattatgtaaaaaaggttaataaggctactgaagcagctatgtttttaggatgggtagaacaattagtttatgattttacagatgaaacatctgaagtatctacaactgataaaatagctgatataactattataattccatatataggaccagctttaaatataggtaatatgttatataaagatgattttgtaggtgcattaatattttcaggagcagttatacttctagaatttattccagaaatagctataccagtattaggaacttttgctcttgtttcatatatagctaataaggtacttacagtacaaacaattgataatgcattaagcaaaaggaatgaaaaatgggatgaagtttataaatatatagtaacaaattggttagcaaaagttaatactcaaatagatttaataagaaagaaaatgaaagaagctcttgaaaatcaagctgaagcaactaaggctataattaattatcaatataatcaatatacagaagaagaaaaaaataatattaattttaatatagatgatcttagtagcaaattaaatgaatctattaataaggctatgataaatataaataaatttttaaatcaatgttcagtaagttatttaatgaattcaatgataccatatggagtaaagagacttgaagattttgatgcttcattaaaagatgctttacttaaatatatttatgataatagaggaactttaattggacaagttgatagattaaaagataaagttaataatactctatcaacagatataccatttcaattatctaaatatgtagataatcaaagattacttagtacttttactgaatatataaaaaatataattaatactagtatattaaatttaagatatgaaagtaatcatcttatagatttaagtagatatgcttcaaagattaatataggaagtaaagttaattttgatcctatagataagaatcaaatacaattatttaatttagaatcaagtaaaatagaagttatattaaagaatgctatagtatataattctatgtatgaaaattttagtacttctttttggattagaataccaaagtattttaatagtatatcattaaataatgaatatactattataaattgtatggaaaataatagtggatggaaggtatctttaaattatggagaaataatttggactttacaagatactcaagaaataaagcaaagagttgtatttaaatattcacaaatgataaatattagcgattatattaatagatggatttttgtaactataactaataatagattaaataattcaaaaatatatattaatggaagattaatagatcaaaagccaatttctaatcttggaaatatacatgcttctaataatattatgtttaaattagatggatgtagagatactcatagatatatatggataaaatattttaatttatttgataaggaattaaatgaaaaagaaattaaagatctttatgataatcaatcaaatagtggtatattaaaagatttttggggtgattatttacaatatgataagccttattatatgttaaatttatatgatcctaataaatatgttgatgttaataatgttggtataaggggatatatgtatcttaaaggacctagaggatctgttatgactactaatatatatttaaatagttcattatatagaggaactaaatttattataaaaaagtatgcatcaggaaataaagataatatagtaagaaataatgatagagtatatataaatgtagttgttaaaaataaagaatatagattagcaactaatgcatcacaagcaggagttgaaaaaatattatcagctttagaaataccagatgttggtaatttatctcaagttgttgttatgaaaagtaaaaatgatcaaggaataactaataaatgtaaaatgaatttacaagataataatggtaatgatattggatttataggatttcatcaatttaataatatagctaagttagttgcttcaaattggtataatagacaaatagaaaggtcaagtagaactttaggatgttcatgggaatttattccagttgatgatggatggggagaaagaccactttaa

SEQ ID NO: 25 - DNA, 3891 bp, Artificial Sequence
  BoNT/A, L. lactis-modified 1
atgccatttgtgaataaacaatttaattataaggatcctgtaaatggtgtggacattgcttatattaaaatacctaacgctggacaaatgcaacctgttaaagcgttcaaaatccataataaaatttgggttattccagaacgcgatacatttacaaatcctgaagagggagacttaaatccacctccagaggctaagcaagtaccggtgagttattacgactctacttatctctctacagataatgagaaagataattatctaaagggtgttactaagttatttgaaagaatttatagtacagatctaggacgtatgttacttacaagcattgttcgaggaatacccttttggggcggttctacaattgatactgagttgaaggtgattgatacaaattgtattaacgttatccaacctgacggatcatatagatcagaagagttaaatttagttataatcggaccaagtgcagatattatccaatttgaatgtaaatcctttggtcatgaagtacttaatcttacccgaaatggatatgggagtacacaatacattcgttttagcccagattttacattcggctttgaagagtcactagaagtagatactaatcctctcttaggagctgggaagtttgcgacagacccggcagtcacgctagcacatgaacttattcacgctggacaccgcttatatggaattgccatcaacccaaacagagtttttaaagttaatactaatgcatattacgaaatgtcgggactcgaagtttcttttgaagagcttcggactttcggtgggcatgatgcgaaatttatcgacagcttacaagaaaatgaattccgattatattactataacaaatttaaagatattgcttctactttaaacaaagcaaaatcaattgttggaacgacagctagtcttcagtatatgaaaaacgtattcaaggaaaaatatttactttccgaagatacctctgggaagttcagtgttgataaattgaagttcgacaaattatataaaatgttaacggagatttatactgaggataattttgttaaatttttcaaagtattaaatagaaaaacctatttgaactttgacaaagccgtatttaaaatcaatattgttcctaaagtgaactatacgatctatgatgggtttaatttgagaaataccaatctagctgcaaattttaatggtcaaaacactgaaataaacaatatgaattttacaaaacttaaaaacttcactggattatttgaattttataagttattgtgtgtccgtggtattatcacttccaaaacaaaaagccttgataaaggttacaataaggccctcaacgacttatgcattaaagttaataactgggacttgttctttagtccgtccgaagataattttacgaatgatttgaataaaggtgaagagataacgagtgatactaatattgaagccgctgaagagaatattagtcttgatctaatacaacagtattacttaacttttaattttgataatgaaccagaaaatatctcaatcgaaaatctatcgtctgacattatcggtcaactggaactcatgccaaatatagaacgatttcccaacggcaaaaagtacgaattagataaatatactatgtttcattatttacgtgctcaagaatttgaacatggaaagtctcgtattgcccttacaaattcggtaaatgaggctcttctgaatccttcgagggtctatacatttttctcaagcgattatgtaaaaaaggtcaacaaagctacagaagccgctatgtttttaggttgggtggaacagcttgtatacgatttcactgatgaaacatcagaagtttctacaactgataaaatcgcagatatcacaataattatcccatatattggtcccgcattaaatattggaaatatgttgtacaaagatgactttgtcggggcattgatcttcagtggggcagtcatactgcttgaatttattccagaaattgctattccagtactcggtacatttgctcttgtgagctatatagcaaataaagtattaacagttcaaactattgacaacgctttatcaaaacgtaatgaaaaatgggacgaagtttataaatacattgttactaattggttggcaaaagttaatactcaaatagacttgattagaaaaaagatgaaagaagctcttgaaaatcaagcggaggctacaaaagctataattaattaccaatataatcaatataccgaagaggaaaaaaataacattaacttcaatatcgatgacttaagtagcaaattaaatgaatcaattaacaaagcaatgattaatataaataaatttctgaatcaatgttctgttagttatctcatgaactcaatgattccttatggagttaaacgtttggaagattttgatgcttctcttaaagatgcacttctgaaatatatttatgataatcgcggaacacttattggtcaggttgataggcttaaagataaagtcaataacacactttcaaccgacataccttttcaactttcaaagtatgttgataatcagcggttgttaagtacctttacagaatatatcaaaaacattatcaatacaagtattttgaatttgcgttacgaatctaatcatttgattgatttgtcaagatatgcatcaaaaattaatattggctctaaagtaaatttcgatcctattgataaaaatcaaattcaattatttaatttggaatcaagcaaaatagaagtgattctaaaaaatgctattgtttataatagtatgtatgaaaatttttcaacttcattttggattcggatacctaagtattttaattcaatttcattaaataacgaatatacgattataaattgtatggaaaacaattctgggtggaaagtttctttaaattatggtgaaataatttggaccttgcaagatacccaagaaataaaacaacgtgtagtttttaaatactctcagatgattaatatttctgattacattaatagatggatttttgttactattactaataacagattgaacaattctaaaatttatatcaatggacgtttaatcgatcaaaaaccaattagtaatttaggaaatattcatgcatctaataacattatgtttaaattagacggatgtcgtgatactcacagatatatctggattaagtactttaatctattcgataaagaattgaatgaaaaagaaattaaagatttatatgacaatcaaagtaattcaggtattttaaaagatttttggggtgattatttgcaatatgataagccatactatatgttgaatctttatgatcctaacaaatatgtcgatgttaataacgtcggtattagaggatacatgtatctcaaaggcccacgcggttcagttatgacaactaatatataccttaattcaagtctataccgtggcacaaagtttatcattaaaaaatatgcctcaggtaacaaagataatattgtccgtaataacgaccgagtatatatcaatgttgtggttaaaaataaagaatatcgtctggccaccaatgcgtctcaagcaggagtggaaaaaattttatctgcacttgaaattccagatgttggtaatctttcacaagtagtcgttatgaaaagtaaaaatgaccaaggaattacgaataaatgcaaaatgaatttacaagataataacggtaatgatattggttttattggttttcatcagtttaataatattgctaaattagttgcatcaaattggtataatagacaaattgaacgttcatctcgaactcttggatgttcgtgggaattcattccagtcgatgatggctggggtgaacgacctttgtaa

SEQ ID NO: 26 - DNA, 3891 bp, Artificial Sequence
  BoNT/A, L. lactis-modified 2
atgccatttgttaataaacaatttaattataaagatccagttaatggtgttgatattgcttatattaaaattccaaatgctggtcaaatgcaaccagttaaagcttttaaaattcataataaaatttgggttattccagaacgtgatacatttacaaatccagaagaaggtgatttaaatccaccaccagaagctaaacaagttccagtttcatattatgattcaacatatttatcaacagataatgaaaaagataattatttaaaaggtgttacaaaattatttgaacgtatttattcaacagatttaggtcgtatgttattaacatcaattgttcgtggtattccattttggggtggttcaacaattgatacagaattaaaagttattgatacaaattgtattaatgttattcaaccagatggttcatatcgttcagaagaattaaatttagttattattggtccatcagctgatattattcaatttgaatgtaaatcatttggtcatgaagttttaaatttaacacgtaatggttatggttcaacacaatatattcgtttttcaccagattttacatttggttttgaagaatcattagaagttgatacaaatccattattaggtgctggtaaatttgctacagatccagctgttacattagctcatgaattaattcatgctggtcatcgtttatatggtattgctattaatccaaatcgtgtttttaaagttaatacaaatgcttattatgaaatgtcaggtttagaagtttcatttgaagaattacgtacatttggtggtcatgatgctaaatttattgattcattacaagaaaatgaatttcgtttatattattataataaatttaaagatattgcttcaacattaaataaagctaaatcaattgttggtacaacagcttcattacaatatatgaaaaatgtttttaaagaaaaatatttattatcagaagatacatcaggtaaattttcagttgataaattaaaatttgataaattatataaaatgttaacagaaatttatacagaagataattttgttaaattttttaaagttttaaatcgtaaaacatatttaaattttgataaagctgtttttaaaattaatattgttccaaaagttaattatacaatttatgatggttttaatttacgtaatacaaatttagctgctaattttaatggtcaaaatacagaaattaataatatgaattttacaaaattaaaaaattttacaggtttatttgaattttataaattattatgtgttcgtggtattattacatcaaaaacaaaatcattagataaaggttataataaagctttaaatgatttatgtattaaagttaataattgggatttatttttttcaccatcagaagataattttacaaatgatttaaataaaggtgaagaaattacatcagatacaaatattgaagctgctgaagaaaatatttcattagatttaattcaacaatattatttaacatttaattttgataatgaaccagaaaatatttcaattgaaaatttatcatcagatattattggtcaattagaattaatgccaaatattgaacgttttccaaatggtaaaaaatatgaattagataaatatacaatgtttcattatttacgtgctcaagaatttgaacatggtaaatcacgtattgctttaacaaattcagttaatgaagctttattaaatccatcacgtgtttatacatttttttcatcagattatgttaaaaaagttaataaagctacagaagctgctatgtttttaggttgggttgaacaattagtttatgattttacagatgaaacatcagaagtttcaacaacagataaaattgctgatattacaattattattccatatattggtccagctttaaatattggtaatatgttatataaagatgattttgttggtgctttaattttttcaggtgctgttattttattagaatttattccagaaattgctattccagttttaggtacatttgctttagtttcatatattgctaataaagttttaacagttcaaacaattgataatgctttatcaaaacgtaatgaaaaatgggatgaagtttataaatatattgttacaaattggttagctaaagttaatacacaaattgatttaattcgtaaaaaaatgaaagaagctttagaaaatcaagctgaagctacaaaagctattattaattatcaatataatcaatatacagaagaagaaaaaaataatattaattttaatattgatgatttatcatcaaaattaaatgaatcaattaataaagctatgattaatattaataaatttttaaatcaatgttcagtttcatatttaatgaattcaatgattccatatggtgttaaacgtttagaagattttgatgcttcattaaaagatgctttattaaaatatatttatgataatcgtggtacattaattggtcaagttgatcgtttaaaagataaagttaataatacattatcaacagatattccatttcaattatcaaaatatgttgataatcaacgtttattatcaacatttacagaatatattaaaaatattattaatacatcaattttaaatttacgttatgaatcaaatcatttaattgatttatcacgttatgcttcaaaaattaatattggttcaaaagttaattttgatccaattgataaaaatcaaattcaattatttaatttagaatcatcaaaaattgaagttattttaaaaaatgctattgtttataattcaatgtatgaaaatttttcaacatcattttggattcgtattccaaaatattttaattcaatttcattaaataatgaatatacaattattaattgtatggaaaataattcaggttggaaagtttcattaaattatggtgaaattatttggacattacaagatacacaagaaattaaacaacgtgttgtttttaaatattcacaaatgattaatatttcagattatattaatcgttggatttttgttacaattacaaataatcgtttaaataattcaaaaatttatattaatggtcgtttaattgatcaaaaaccaatttcaaatttaggtaatattcatgcttcaaataatattatgtttaaattagatggttgtcgtgatacacatcgttatatttggattaaatattttaatttatttgataaagaattaaatgaaaaagaaattaaagatttatatgataatcaatcaaattcaggtattttaaaagatttttggggtgattatttacaatatgataaaccatattatatgttaaatttatatgatccaaataaatatgttgatgttaataatgttggtattcgtggttatatgtatttaaaaggtccacgtggttcagttatgacaacaaatatttatttaaattcatcattatatcgtggtacaaaatttattattaaaaaatatgcttcaggtaataaagataatattgttcgtaataatgatcgtgtttatattaatgttgttgttaaaaataaagaatatcgtttagctacaaatgcttcacaagctggtgttgaaaaaattttatcagctttagaaattccagatgttggtaatttatcacaagttgttgttatgaaatcaaaaaatgatcaaggtattacaaataaatgtaaaatgaatttacaagataataatggtaatgatattggttttattggttttcatcaatttaataatattgctaaattagttgcttcaaattggtataatcgtcaaattgaacgttcatcacgtacattaggttgttcatgggaatttattccagttgatgatggttggggtgaacgtccattataa

SEQ ID NO: 27 - DNA, 3891 bp, Artificial Sequence
  BoNT/A, L. lactis-modified 3
atgccatttgtcaataaacaatttaattataaagatccagtaaatggtgtggatattgcatatattaaaatccctaatgccggtcaaatgcaaccagttaaagcttttaaaattcacaataaaatctgggttattccagaacgtgatacttttacaaatccagaagaaggagacttaaatcctccacctgaagctaaacaagtgcctgtaagttattacgattctacatatttgagtacagacaatgaaaaagataattatcttaaaggagttactaaactttttgaacgtatttactcaactgatcttggtcgtatgctattaaccagtattgttcgcggtattccattttggggaggttctacaattgatactgaattaaaagtaattgatactaattgtatcaatgtgattcaacctgacggttcatatagatcagaagaattaaatttagttattatcggaccttctgcagatattatccaatttgaatgtaaatcttttggtcatgaagtactaaatttaactcgtaatggttatggttcaactcaatatatccgtttttcaccagattttacatttggttttgaagaaagtctagaagtagacacaaatcctttattgggtgcaggtaaatttgcaacagacccagcagttaccctagctcatgaacttatccacgctggtcatcgattgtacggaattgctattaatcctaatagagtttttaaagttaatactaatgcttactatgaaatgtcaggtttagaagttagttttgaagaattgcgtacctttggaggtcatgatgctaaatttattgattctcttcaagaaaatgaatttagactttattactataataaatttaaagatattgcatctacacttaataaagctaaatcaattgttggtactacagcctctttacaatatatgaaaaatgtttttaaagaaaaatacctattgagtgaagatactagcggaaaattttctgtagacaaattgaaatttgataaactttacaaaatgttaacagaaatttatactgaagacaattttgtaaaattttttaaagttttaaatagaaaaacatatctaaattttgacaaagctgtatttaaaattaatatcgtgccaaaagttaattatactatttatgacggttttaatcttagaaataccaatttagcagctaattttaatggacaaaatacagaaattaataatatgaattttactaaattgaaaaattttacaggtctttttgaattttataaattgctttgtgttcgcggaatcattactagtaaaacaaaatctcttgataaaggatataataaagctttaaatgatttatgtattaaagtgaataattgggatttatttttttctccttcagaagacaattttacaaatgacttaaataaaggagaagaaattacatctgatacaaatattgaagcagctgaagaaaatatttctttagatttaattcaacaatattacttaacatttaattttgataatgaaccagaaaatatttctattgaaaatttgtcaagtgatattatcggtcaattagaattaatgccaaatattgaaagatttccaaatggtaaaaaatacgaacttgataaatacacaatgtttcattatttacgtgcacaagaatttgaacatggaaaaagtcgaattgctttaacaaatagtgtcaatgaagctttgcttaatccaagtcgtgtgtatacctttttttcttcagattatgtaaaaaaagtgaataaagctacagaagcagccatgtttcttggttgggttgaacaattagtgtatgattttactgatgaaacctcagaagtctcaacaactgataaaattgcagatatcacaattatcattccatatattggtccagcattaaatattggaaatatgttatataaagacgattttgttggtgctttgatttttagcggtgctgttattttacttgaatttattcctgaaattgccattccagtcttgggaacctttgctttagtaagttatattgcaaataaagtgttaacagttcaaacaattgataatgccttatctaaacgaaatgaaaaatgggatgaagtatacaaatacattgttaccaattggttggccaaagtaaatacacaaattgacttaattcgcaaaaaaatgaaagaagcattagaaaatcaagccgaagcaaccaaagctattatcaattatcaatataatcaatatacagaagaagaaaaaaataatattaattttaatattgatgacttaagctcaaaattgaatgaatcaattaataaagctatgattaatattaataaatttcttaatcaatgttcagtttcatacttaatgaattcaatgattccttacggtgttaaacgtcttgaagattttgacgcatcattaaaagatgctttattgaaatatatttatgataatcgcggaacacttattggtcaagtcgatagacttaaagacaaagtcaataatactttgtctaccgacatcccatttcaattatcaaaatatgttgataatcaaagattactttcaacttttacagaatacattaaaaatattatcaatacttctatcttaaatttacgttatgaatcaaatcatcttattgacctttctcgatatgcttctaaaattaatattggatcaaaagttaattttgatcctattgataaaaatcaaattcaattgtttaatttagaaagttctaaaattgaagtaattttaaaaaatgcaattgtctataattcaatgtatgaaaatttttcaacttcattttggattcgaatcccaaaatattttaattctatctcattaaataatgaatatacaatcattaattgtatggaaaataatagtggatggaaagtctcacttaattatggtgaaattatctggactttgcaagatacacaagaaatcaaacaacgtgttgtgtttaaatatagccaaatgattaatattagtgattatattaatcgttggatttttgttacaattactaataatagattgaataatagtaaaatttatattaatggacgactaattgatcaaaaacctatttcaaatttgggtaatattcatgcaagcaataatatcatgtttaaacttgatggttgtagagatacacaccgatatatttggatcaaatactttaatttatttgacaaagaactaaatgaaaaagaaattaaagacttatatgataatcaatcaaattctggtatcttaaaagatttttggggtgattatcttcaatatgataaaccatattacatgttgaatttatatgatcctaataaatatgttgatgtaaataatgttggtattagaggttatatgtacttgaaaggaccacgtggttcagttatgacaactaatatttatttaaattcaagtttatatcgtggtactaaatttattattaaaaaatatgctagcggaaataaagataatattgtccgtaataatgaccgtgtctatattaatgttgtcgttaaaaataaagaataccgtctagctacaaatgctagccaagccggtgttgaaaaaattttatcagcattagaaattccagatgtaggtaatttgagtcaagttgtcgttatgaaaagcaaaaatgatcaaggaattactaataaatgtaaaatgaatcttcaagataataatggtaatgatattggttttattggatttcatcaatttaataatattgctaaactagtagcttcaaattggtataatcgtcaaattgaaagatcaagtcgtacattaggatgttcatgggaatttattcctgttgatgatggttggggagaacgtccattgtaa

SEQ ID NO: 28 - DNA, 3891 bp, Artificial Sequence
  BoNT/A,  M. extorquens-modified 1
atgccgttcgtcaacaagcagtttaactacaaggacccggtcaacggcgtcgacatcgcttacatcaagatcccgaacgccggccaaatgcagccggtgaaggcgttcaaaatccacaacaagatctgggtcatccccgagcgcgacacgttcaccaaccccgaggaaggcgacctgaacccacccccggaggccaagcaggtccccgtgagctattacgacagcacctatctctccacggacaacgagaaggataattacctgaagggcgtgaccaagctcttcgaacggatctactcgacggacctgggccggatgctcctgaccagcatcgtacgcggtatcccgttctgggggggcagcaccatcgatacggagctcaaggtgatcgacaccaactgcatcaacgtgatccagccggatggctcgtaccgctccgaagagctgaacctcgtcatcattggcccgtccgccgacatcattcagtttgagtgcaagtccttcggccacgaggtcctcaacctgacccggaacgggtacggctccacccagtacatccgcttctcgccggacttcacgttcggcttcgaggaatcgctcgaggtggacacgaaccctctcctgggtgccggcaagttcgcgacggaccccgccgtgaccctggcgcacgagctcatccacgccggacaccggctctacggtatcgccatcaatccgaatcgcgtcttcaaggtgaacaccaacgcctactatgaaatgtcgggccttgaggtctccttcgaggaactgcgcaccttcggcgggcacgacgccaagttcatcgactccctgcaggagaacgagttccgcctctactattacaacaagttcaaggatatcgcctccacgctcaacaaggccaagtcgatcgtgggcacgaccgcgtctctccagtatatgaagaacgtcttcaaggagaagtacctgctctcggaggatacctcgggcaagttctcggtcgataagctcaagttcgacaagctctataagatgctgaccgaaatctacacggaggataatttcgtcaagttctttaaggtgctcaaccgcaagacctacctcaatttcgacaaggccgtcttcaagatcaacatcgtgccgaaagtgaactacaccatctacgatggcttcaacctgcgtaacacgaacctggccgcgaacttcaacggccaaaacaccgagatcaacaatatgaatttcaccaagctgaagaacttcactggcctcttcgagttctacaagctgctctgtgtccgcggcatcattaccagcaagaccaagagcctggataagggctataacaaggccctcaacgatctctgcatcaaggttaataactgggatctcttcttttcgccgagcgaggacaacttcacgaacgatctcaataagggcgaggaaatcaccagcgacaccaacatcgaagccgcggaggaaaacatcagcctcgacctcatccagcaatattacctcacgttcaatttcgacaacgagccggagaacatcagcatcgagaacctctcgagcgacatcattggccagctcgagctgatgccgaacatcgagcgcttccccaacgggaagaaatatgagctcgataagtacacgatgttccactacctgcgtgcccaggagttcgagcatggcaagagccgcatcgcgctcacgaactccgtcaacgaggccctcctgaacccgtcgcgggtctacaccttcttcagctccgactatgtgaagaaagtgaacaaggccacggaggcggccatgttcctcggttgggtcgagcagctggtctacgacttcacggacgaaaccagcgaggtgtcgaccacggacaagatcgcggacatcaccatcataatcccgtacatcggaccggccctgaacatcggcaacatgctgtacaaggacgatttcgtcggggccctgatcttcagcggcgcggtcatcctcctggagttcatccccgagatcgcgatccccgtcctcggcaccttcgcgctcgtgtcctacatcgcaaataaggtgctcaccgtgcagacgatcgacaacgcgctgtccaagcgcaacgaaaagtgggacgaggtctacaagtacatcgtgaccaactggctcgcgaaggtgaacacacagatcgacctcatccggaagaaaatgaaggaggcgctcgagaaccaggctgaggccaccaaagcgatcattaactaccagtacaaccagtataccgaggaagagaagaataacattaacttcaacatcgacgatctgagttcgaagctgaacgagtccatcaacaaggcgatgatcaacatcaataagttcctgaaccagtgctcggtttcgtacttgatgaacagcatgatcccgtacggggtgaagcgcctcgaagatttcgacgcctccctcaaggacgcactcctgaagtacatctacgacaaccgcggcacacttatcggtcaggtggacaggctcaaggacaaggtcaacaataccctgagcaccgatatccccttccagctctcgaagtacgtggacaatcagcgcctgctctccaccttcacggagtacatcaagaatatcatcaataccagcatcctgaacctgcggtacgagagcaaccacttgatcgacctctcgcgctacgcctcgaagatcaacatcgggtccaaggtcaacttcgacccgatcgacaagaaccagatccagctgttcaacctcgagtcgtccaagatcgaggtgatcctgaagaacgccatcgtgtataactcgatgtacgagaacttctccacctcattctggatccgcatccccaagtacttcaactccatctcgcttaacaatgaatacacgatcatcaactgcatggagaacaactcgggctggaaggtctcgttgaactacggcgagatcatctggacgctacaggacacgcaggagatcaagcagcgggtcgtgttcaagtactcgcagatgatcaacatctcggactacatcaaccgctggatcttcgtgaccatcaccaacaaccggctgaacaactccaagatctacatcaacggccgcctgatcgaccagaagccgatctcgaacctcggcaacatccatgcctctaacaacatcatgttcaagctggacggctgccgcgatacccaccgctacatctggatcaagtacttcaacctgttcgacaaggagcttaacgagaaggagatcaaggatctgtatgacaaccagtccaactcgggcatcttgaaggacttctggggcgactacctgcagtacgataaaccgtactatatgctcaacctgtacgacccgaacaagtacgtggatgtcaacaacgtcggcatccggggctacatgtacctcaagggcccccgcggctccgtcatgaccaccaacatctatctgaactcgagcctctaccgcggcaccaagttcatcatcaagaagtacgcctcgggcaacaaggacaacatcgtccgcaacaacgaccgggtctacatcaacgttgtcgtgaagaacaaggagtatcgtctggcgaccaacgccagccaggcgggcgtcgagaagatcctctcggcgctggagatccccgatgtgggcaacctctcgcaggtcgtggtcatgaagagcaagaacgaccagggcatcaccaacaagtgcaagatgaacctgcaggacaacaacggcaacgacatcggcttcatcggcttccatcagttcaacaacatcgccaagctggtggcctcgaactggtataaccgccagatcgagcgctcgtcacgaaccctgggctgctcgtgggagttcatccccgtggacgacgggtggggcgagcgcccgctttaa

SEQ ID NO: 29 - DNA, 3891 bp, Artificial Sequence
  BoNT/A,  M. extorquens-modified 2
atgccgttcgtcaacaagcagttcaactacaaggacccggtcaacggcgtcgacatcgcctacatcaagatcccgaacgccggccagatgcagccggtcaaggccttcaagatccacaacaagatctgggtcatcccggagcgcgacaccttcaccaacccggaggagggcgacctcaacccgccgccggaggccaagcaggtcccggtctcgtactacgactcgacctacctctcgaccgacaacgagaaggacaactacctcaagggcgtcaccaagctcttcgagcgcatctactcgaccgacctcggccgcatgctcctcacctcgatcgtccgcggcatcccgttctggggcggctcgaccatcgacaccgagctcaaggtcatcgacaccaactgcatcaacgtcatccagccggacggctcgtaccgctcggaggagctcaacctcgtcatcatcggcccgtcggccgacatcatccagttcgagtgcaagtcgttcggccacgaggtcctcaacctcacccgcaacggctacggctcgacccagtacatccgcttctcgccggacttcaccttcggcttcgaggagtcgctcgaggtcgacaccaacccgctcctcggcgccggcaagttcgccaccgacccggccgtcaccctcgcccacgagctcatccacgccggccaccgcctctacggcatcgccatcaacccgaaccgcgtcttcaaggtcaacaccaacgcctactacgagatgtcgggcctcgaggtctcgttcgaggagctccgcaccttcggcggccacgacgccaagttcatcgactcgctccaggagaacgagttccgcctctactactacaacaagttcaaggacatcgcctcgaccctcaacaaggccaagtcgatcgtcggcaccaccgcctcgctccagtacatgaagaacgtcttcaaggagaagtacctcctctcggaggacacctcgggcaagttctcggtcgacaagctcaagttcgacaagctctacaagatgctcaccgagatctacaccgaggacaacttcgtcaagttcttcaaggtcctcaaccgcaagacctacctcaacttcgacaaggccgtcttcaagatcaacatcgtcccgaaggtcaactacaccatctacgacggcttcaacctccgcaacaccaacctcgccgccaacttcaacggccagaacaccgagatcaacaacatgaacttcaccaagctcaagaacttcaccggcctcttcgagttctacaagctcctctgcgtccgcggcatcatcacctcgaagaccaagtcgctcgacaagggctacaacaaggccctcaacgacctctgcatcaaggtcaacaactgggacctcttcttctcgccgtcggaggacaacttcaccaacgacctcaacaagggcgaggagatcacctcggacaccaacatcgaggccgccgaggagaacatctcgctcgacctcatccagcagtactacctcaccttcaacttcgacaacgagccggagaacatctcgatcgagaacctctcgtcggacatcatcggccagctcgagctcatgccgaacatcgagcgcttcccgaacggcaagaagtacgagctcgacaagtacaccatgttccactacctccgcgcccaggagttcgagcacggcaagtcgcgcatcgccctcaccaactcggtcaacgaggccctcctcaacccgtcgcgcgtctacaccttcttctcgtcggactacgtcaagaaggtcaacaaggccaccgaggccgccatgttcctcggctgggtcgagcagctcgtctacgacttcaccgacgagacctcggaggtctcgaccaccgacaagatcgccgacatcaccatcatcatcccgtacatcggcccggccctcaacatcggcaacatgctctacaaggacgacttcgtcggcgccctcatcttctcgggcgccgtcatcctcctcgagttcatcccggagatcgccatcccggtcctcggcaccttcgccctcgtctcgtacatcgccaacaaggtcctcaccgtccagaccatcgacaacgccctctcgaagcgcaacgagaagtgggacgaggtctacaagtacatcgtcaccaactggctcgccaaggtcaacacccagatcgacctcatccgcaagaagatgaaggaggccctcgagaaccaggccgaggccaccaaggccatcatcaactaccagtacaaccagtacaccgaggaggagaagaacaacatcaacttcaacatcgacgacctctcgtcgaagctcaacgagtcgatcaacaaggccatgatcaacatcaacaagttcctcaaccagtgctcggtctcgtacctcatgaactcgatgatcccgtacggcgtcaagcgcctcgaggacttcgacgcctcgctcaaggacgccctcctcaagtacatctacgacaaccgcggcaccctcatcggccaggtcgaccgcctcaaggacaaggtcaacaacaccctctcgaccgacatcccgttccagctctcgaagtacgtcgacaaccagcgcctcctctcgaccttcaccgagtacatcaagaacatcatcaacacctcgatcctcaacctccgctacgagtcgaaccacctcatcgacctctcgcgctacgcctcgaagatcaacatcggctcgaaggtcaacttcgacccgatcgacaagaaccagatccagctcttcaacctcgagtcgtcgaagatcgaggtcatcctcaagaacgccatcgtctacaactcgatgtacgagaacttctcgacctcgttctggatccgcatcccgaagtacttcaactcgatctcgctcaacaacgagtacaccatcatcaactgcatggagaacaactcgggctggaaggtctcgctcaactacggcgagatcatctggaccctccaggacacccaggagatcaagcagcgcgtcgtcttcaagtactcgcagatgatcaacatctcggactacatcaaccgctggatcttcgtcaccatcaccaacaaccgcctcaacaactcgaagatctacatcaacggccgcctcatcgaccagaagccgatctcgaacctcggcaacatccacgcctcgaacaacatcatgttcaagctcgacggctgccgcgacacccaccgctacatctggatcaagtacttcaacctcttcgacaaggagctcaacgagaaggagatcaaggacctctacgacaaccagtcgaactcgggcatcctcaaggacttctggggcgactacctccagtacgacaagccgtactacatgctcaacctctacgacccgaacaagtacgtcgacgtcaacaacgtcggcatccgcggctacatgtacctcaagggcccgcgcggctcggtcatgaccaccaacatctacctcaactcgtcgctctaccgcggcaccaagttcatcatcaagaagtacgcctcgggcaacaaggacaacatcgtccgcaacaacgaccgcgtctacatcaacgtcgtcgtcaagaacaaggagtaccgcctcgccaccaacgcctcgcaggccggcgtcgagaagatcctctcggccctcgagatcccggacgtcggcaacctctcgcaggtcgtcgtcatgaagtcgaagaacgaccagggcatcaccaacaagtgcaagatgaacctccaggacaacaacggcaacgacatcggcttcatcggcttccaccagttcaacaacatcgccaagctcgtcgcctcgaactggtacaaccgccagatcgagcgctcgtcgcgcaccctcggctgctcgtgggagttcatcccggtcgacgacggctggggcgagcgcccgctctaa

SEQ ID NO: 30 - DNA, 3891 bp, Artificial Sequence
  BoNT/A,  M. extorquens-modified 3
atgccgttcgtcaacaagcagttcaactacaaggatcccgtgaacggcgtcgacatcgcctacatcaagatcccgaacgccggccagatgcagcccgtcaaggccttcaagatccataacaagatctgggtgatcccggagcgcgataccttcacgaacccggaggagggcgacctcaacccgcccccggaggcgaagcaggtgcccgtgtcctactacgactcgacctacctctccacggacaacgagaaggataactacctcaagggcgtcaccaagctgttcgagcgcatctactcgaccgacctgggccgcatgctcctgacgtcgatcgtccggggcatcccgttctggggcggctccaccatcgacaccgagctgaaggtcatcgataccaactgcatcaacgtcatccagccggacggctcctaccgctcggaggagctcaacctcgtcatcatcggcccctccgccgacatcatccagttcgagtgcaagtccttcggccacgaggtgctcaacctgacccgcaacggctacggctcgacccagtacatccggttctcgccggacttcacgttcggcttcgaggagagcctcgaggtcgacaccaacccgctcctgggcgccggcaagttcgcgaccgatcccgccgtcaccctcgcgcacgagctcatccacgccggccaccggctgtacggcatcgccatcaacccgaaccgcgtgttcaaggtgaacacgaacgcctactacgagatgtcgggcctggaggtcagcttcgaggagctgcgcaccttcggcggccatgacgccaagttcatcgacagcctccaggagaacgagttccggctgtactactacaacaagttcaaggacatcgcgtccacgctgaacaaggccaagagcatcgtgggcacgaccgcgtcgctccagtacatgaagaacgtgttcaaggagaagtacctcctgtcggaggatacctcgggcaagttctcggtggataagctcaagttcgacaagctgtacaagatgctcacggagatctacaccgaggacaacttcgtgaagttcttcaaggtgctgaaccgcaagacctacctgaacttcgataaggccgtcttcaagatcaacatcgtcccgaaggtcaactacaccatctacgacggcttcaacctccggaacaccaacctcgcggccaacttcaacggccagaacacggagatcaacaacatgaacttcaccaagctgaagaacttcaccggcctcttcgagttctacaagctcctgtgcgtccgcggcatcatcacctcgaagaccaagagcctcgacaagggctacaacaaggccctcaacgacctctgcatcaaggtcaacaactgggatctcttcttctcgccgtcggaggataacttcaccaacgacctcaacaagggcgaggagatcaccagcgacacgaacatcgaggcggccgaggagaacatctccctggacctcatccagcagtactacctcacgttcaacttcgataacgagccggagaacatctcgatcgagaacctctcgagcgacatcatcggccagctcgagctcatgcccaacatcgagcgcttccccaacggcaagaagtacgagctggacaagtacaccatgttccactacctccgcgcccaggagttcgagcatggcaagtcccggatcgcgctgacgaacagcgtcaacgaggcgctgctcaacccctcgcgcgtgtacacgttcttctcgagcgactacgtgaagaaggtgaacaaggccacggaggcggccatgttcctcggctgggtggagcagctggtctacgacttcaccgacgagacctcggaggtctccaccacggacaagatcgcggacatcaccatcatcatcccgtacatcggcccggccctcaacatcggcaacatgctctacaaggacgatttcgtcggcgcgctcatcttcagcggcgccgtgatcctgctcgagttcatccccgagatcgccatcccggtcctgggcaccttcgcgctggtcagctacatcgccaacaaggtcctgaccgtgcagaccatcgacaacgccctctcgaagcgcaacgagaagtgggatgaggtgtacaagtacatcgtcaccaactggctcgccaaggtcaacacgcagatcgacctgatccggaagaagatgaaggaggccctggagaaccaggccgaggcgacgaaggccatcatcaactaccagtacaaccagtacaccgaggaggagaagaacaacatcaacttcaacatcgacgatctctcctcgaagctcaacgagtcgatcaacaaggcgatgatcaacatcaacaagttcctgaaccagtgctccgtcagctacctcatgaactcgatgatcccgtacggcgtcaagcgcctggaggacttcgacgcgtcgctcaaggacgcgctcctgaagtacatctacgacaaccgcggcaccctgatcggccaggtcgaccgcctcaaggataaggtgaacaacaccctctccacggacatcccgttccagctcagcaagtacgtcgacaaccagcgcctgctcagcaccttcaccgagtacatcaagaacatcatcaacaccagcatcctgaacctgcgctacgagtcgaaccacctcatcgatctcagccggtacgcctcgaagatcaacatcggctcgaaggtcaacttcgatccgatcgacaagaaccagatccagctcttcaacctggagagctcgaagatcgaggtgatcctgaagaacgcgatcgtctacaactcgatgtacgagaacttcagcacgtccttctggatccggatcccgaagtacttcaactccatcagcctgaacaacgagtacacgatcatcaactgcatggagaacaactccggctggaaggtctccctgaactacggcgagatcatctggacgctccaggacacccaggagatcaagcagcgcgtcgtgttcaagtacagccagatgatcaacatctcggattacatcaaccgctggatcttcgtgacgatcaccaacaaccgcctgaacaacagcaagatctacatcaacggccgcctgatcgatcagaagcccatctcgaacctcggcaacatccacgcctccaacaacatcatgttcaagctcgacggctgccgggatacccaccggtacatctggatcaagtacttcaacctcttcgacaaggagctgaacgagaaggagatcaaggatctctacgacaaccagtcgaactcgggcatcctgaaggacttctggggcgactacctccagtacgacaagccgtactacatgctcaacctctacgacccgaacaagtacgtcgacgtgaacaacgtcggcatccgcggctacatgtacctgaagggcccccgcggctccgtgatgaccacgaacatctacctcaactcgtccctctaccgcggcaccaagttcatcatcaagaagtacgcctccggcaacaaggacaacatcgtccgcaacaacgaccgcgtgtacatcaacgtggtcgtgaagaacaaggagtaccgcctcgcgaccaacgcctcgcaggccggcgtggagaagatcctgtcggccctggagatcccggacgtcggcaacctgtcgcaggtggtcgtgatgaagagcaagaacgaccagggcatcaccaacaagtgcaagatgaacctccaggacaacaacggcaacgacatcggcttcatcggcttccaccagttcaacaacatcgccaagctcgtggcgtcgaactggtacaaccgccagatcgagcgctcctcgcgcaccctgggctgctcgtgggagttcatcccggtggacgatggctggggcgagcgccccctgtaa

SEQ ID NO: 31 - DNA, 3891 bp, Artificial Sequence
  BoNT/A,  S. typhimurium-modified 1
atgccgtttgtgaacaaacagtttaactataaggaccccgtcaatggggtagatatcgcgtatatcaaaatcccaaacgccggacagatgcagccggtcaaggcctttaaaattcacaataaaatctgggtgatcccggaaagagacacttttacgaatccggaagagggcgatttgaacccacccccggaggctaaacaggtgccagtatcgtattacgacagtacctacttgagcaccgacaacgaaaaagataactatctgaagggtgttacaaaattatttgagcgtatctattctacggatctgggccgtatgctgcttaccagcatcgtgcgtggtatcccgttctggggcggtagcaccatcgacaccgaattgaaggtaatcgacacgaattgcattaacgtgattcagccggatggaagctaccgctctgaagagttaaatctagtcatcattggccccagtgcggacatcattcagtttgaatgcaaatcgttcgggcacgaagttctgaatctcaccaggaatgggtatggctctacgcaatatattcgttttagcccggatttcacgttcggctttgaggaatcccttgaggtggatacgaatcccctgctaggcgcgggcaaatttgcgacggatccggccgtcacgctcgcccatgaacttatccatgctggccaccggttgtacggcattgcgattaatccgaaccgtgtgtttaaggttaatacgaatgcgtactatgaaatgagcggcttggaggtaagcttcgaagagctgcgcacattcgggggtcacgatgcgaagtttattgactctctgcaggaaaacgagtttcgcttatactattacaacaaattcaaagatatcgcgtcaacccttaacaaggccaaaagtattgttggaacaacggcatcactgcagtacatgaaaaacgtgttcaaagagaaatacctgttgagtgaagacaccagcggtaaattctccgtggataaactaaaatttgataaattgtacaaaatgctgaccgagatctatacagaggataattttgtaaagtttttcaaggtgcttaatcgcaaaacctacctgaatttcgataaagccgtgtttaagatcaatatagttccgaaagtgaactataccatttatgacggctttaacctgcggaatacaaacctggccgcgaattttaacggccagaataccgagatcaataacatgaactttacgaaactcaaaaattttacaggtctgtttgaattttataagctgttgtgcgttcgtggcatcataacgagcaaaacgaaatcgctcgataaagggtataataaagctctgaacgatctgtgtattaaagtgaataactgggacttatttttctcccccagcgaggacaattttaccaatgatctgaataaaggcgaagagataacgtcggataccaatattgaagcggctgaagagaatatctcgttagacctgatccaacagtactatctcacatttaatttcgacaatgaaccggaaaacatctcgatcgaaaacctgagctcggatattatcgggcagctagaattaatgccgaacattgagcggttccctaatgggaagaaatatgagcttgacaaatatactatgtttcattatctgcgcgcgcaagaatttgaacatggtaaatcgcgtattgcactgacgaacagcgtgaatgaagcgctgctcaacccgagccgcgtttatacctttttcagctccgattacgttaagaaagtgaacaaagctacggaggcggccatgttccttggctgggtcgagcagttagtgtatgacttcaccgatgaaacctcagaagtcagcaccactgacaaaattgcggacattacgatcataatcccttacattggaccggcgctgaacattggtaatatgctgtataaagatgactttgtaggcgccctgatcttttccggtgcagtaattctactggaattcatccccgaaatagctattccggtgttaggcacattcgccctggtctcgtacattgcgaataaagtactgacggttcagaccattgataacgcgttatcgaaacgcaacgaaaaatgggatgaggtgtacaagtacatcgtaaccaactggctcgccaaggttaatactcagattgatctgattcgcaaaaagatgaaggaagcgcttgaaaatcaggcagaagcgactaaagcgatcattaactatcagtacaaccagtatacggaagaggaaaaaaacaatatcaactttaacatcgacgatctcagctcaaaattaaatgaatcgattaataaagcgatgattaatataaataaattcctgaatcagtgctcagtttcctatctgatgaacagtatgatcccgtacggtgttaaacgcttggaggatttcgatgcatcactgaaggacgcccttttaaaatatatctatgacaatcggggcaccctgatcggtcaggtcgaccgccttaaagataaagtgaataacaccctgtccacggacattccgttccaactgtccaaatacgtggataatcaacgtctcttgtccacctttactgaatacattaaaaacattatcaacacgagtattctgaacctgcgatatgaatcgaaccatctgatcgacctgagtcgctatgcgagcaaaattaatattgggagtaaagttaactttgatccaattgacaaaaaccagatccagctgtttaacttggaaagttctaagatcgaagtaattctgaaaaacgccatagtgtacaacagcatgtacgagaattttagcactagcttttggattcggatccctaagtatttcaacagcattagtctgaacaatgaatataccattataaactgtatggaaaacaattctggttggaaagtgagcctgaactatggcgaaattatctggaccctgcaggatacccaagaaatcaagcaacgtgtcgtgttcaaatattctcaaatgattaacatttcggattacattaatcgttggatttttgtcaccattaccaataaccgtcttaacaattctaaaatttatataaatggcagattgattgatcaaaaacctattagtaacctggggaatattcacgcgagcaataacatcatgtttaaactggatggatgccgagatacgcatcgctacatatggatcaagtacttcaatctgttcgataaagagctgaatgaaaaggagataaaagatctttacgacaaccagtccaattccggaattctgaaagatttttggggagactatctgcagtatgacaaaccgtattacatgttaaatttatatgacccgaacaaatatgtcgatgtgaacaatgtcggtatccgtgggtatatgtatctgaaaggcccgcgtggcagcgtcatgactacgaacatttatcttaactcctctctgtatcgtggcaccaaatttatcattaagaaatatgcctcaggcaataaagataacatcgtacgcaacaatgatcgcgtttatatcaatgtagtggttaagaacaaagaataccgcctggccaccaacgcatcccaggcgggcgtcgaaaaaattctgtccgccttggagattcctgatgtgggcaacctgtcccaagtcgttgtcatgaaatcaaagaacgaccagggcattacgaacaagtgtaaaatgaacctgcaggataacaatggtaatgatatcggctttattggcttccatcaattcaacaatattgctaaattagtcgcatcgaactggtacaaccgccagatcgaacgcagctcacgcactctcggatgttcttgggaatttattccagtcgatgatggctggggtgagcgacctctctaa

SEQ ID NO: 32 - DNA, 3891 bp, Artificial Sequence
  BoNT/A,  S. typhimurium-modified 2
atgccgtttgtgaacaaacagtttaactataaagatccggtgaacggcgtggatattgcgtatattaaaattccgaacgcgggccagatgcagccggtgaaagcgtttaaaattcataacaaaatttgggtgattccggaacgcgatacctttaccaacccggaagaaggcgatctgaacccgccgccggaagcgaaacaggtgccggtgagctattatgatagcacctatctgagcaccgataacgaaaaagataactatctgaaaggcgtgaccaaactgtttgaacgcatttatagcaccgatctgggccgcatgctgctgaccagcattgtgcgcggcattccgttttggggcggcagcaccattgataccgaactgaaagtgattgataccaactgcattaacgtgattcagccggatggcagctatcgcagcgaagaactgaacctggtgattattggcccgagcgcggatattattcagtttgaatgcaaaagctttggccatgaagtgctgaacctgacccgcaacggctatggcagcacccagtatattcgctttagcccggattttacctttggctttgaagaaagcctggaagtggataccaacccgctgctgggcgcgggcaaatttgcgaccgatccggcggtgaccctggcgcatgaactgattcatgcgggccatcgcctgtatggcattgcgattaacccgaaccgcgtgtttaaagtgaacaccaacgcgtattatgaaatgagcggcctggaagtgagctttgaagaactgcgcacctttggcggccatgatgcgaaatttattgatagcctgcaggaaaacgaatttcgcctgtattattataacaaatttaaagatattgcgagcaccctgaacaaagcgaaaagcattgtgggcaccaccgcgagcctgcagtatatgaaaaacgtgtttaaagaaaaatatctgctgagcgaagataccagcggcaaatttagcgtggataaactgaaatttgataaactgtataaaatgctgaccgaaatttataccgaagataactttgtgaaattttttaaagtgctgaaccgcaaaacctatctgaactttgataaagcggtgtttaaaattaacattgtgccgaaagtgaactataccatttatgatggctttaacctgcgcaacaccaacctggcggcgaactttaacggccagaacaccgaaattaacaacatgaactttaccaaactgaaaaactttaccggcctgtttgaattttataaactgctgtgcgtgcgcggcattattaccagcaaaaccaaaagcctggataaaggctataacaaagcgctgaacgatctgtgcattaaagtgaacaactgggatctgttttttagcccgagcgaagataactttaccaacgatctgaacaaaggcgaagaaattaccagcgataccaacattgaagcggcggaagaaaacattagcctggatctgattcagcagtattatctgacctttaactttgataacgaaccggaaaacattagcattgaaaacctgagcagcgatattattggccagctggaactgatgccgaacattgaacgctttccgaacggcaaaaaatatgaactggataaatataccatgtttcattatctgcgcgcgcaggaatttgaacatggcaaaagccgcattgcgctgaccaacagcgtgaacgaagcgctgctgaacccgagccgcgtgtataccttttttagcagcgattatgtgaaaaaagtgaacaaagcgaccgaagcggcgatgtttctgggctgggtggaacagctggtgtatgattttaccgatgaaaccagcgaagtgagcaccaccgataaaattgcggatattaccattattattccgtatattggcccggcgctgaacattggcaacatgctgtataaagatgattttgtgggcgcgctgatttttagcggcgcggtgattctgctggaatttattccggaaattgcgattccggtgctgggcacctttgcgctggtgagctatattgcgaacaaagtgctgaccgtgcagaccattgataacgcgctgagcaaacgcaacgaaaaatgggatgaagtgtataaatatattgtgaccaactggctggcgaaagtgaacacccagattgatctgattcgcaaaaaaatgaaagaagcgctggaaaaccaggcggaagcgaccaaagcgattattaactatcagtataaccagtataccgaagaagaaaaaaacaacattaactttaacattgatgatctgagcagcaaactgaacgaaagcattaacaaagcgatgattaacattaacaaatttctgaaccagtgcagcgtgagctatctgatgaacagcatgattccgtatggcgtgaaacgcctggaagattttgatgcgagcctgaaagatgcgctgctgaaatatatttatgataaccgcggcaccctgattggccaggtggatcgcctgaaagataaagtgaacaacaccctgagcaccgatattccgtttcagctgagcaaatatgtggataaccagcgcctgctgagcacctttaccgaatatattaaaaacattattaacaccagcattctgaacctgcgctatgaaagcaaccatctgattgatctgagccgctatgcgagcaaaattaacattggcagcaaagtgaactttgatccgattgataaaaaccagattcagctgtttaacctggaaagcagcaaaattgaagtgattctgaaaaacgcgattgtgtataacagcatgtatgaaaactttagcaccagcttttggattcgcattccgaaatattttaacagcattagcctgaacaacgaatataccattattaactgcatggaaaacaacagcggctggaaagtgagcctgaactatggcgaaattatttggaccctgcaggatacccaggaaattaaacagcgcgtggtgtttaaatatagccagatgattaacattagcgattatattaaccgctggatttttgtgaccattaccaacaaccgcctgaacaacagcaaaatttatattaacggccgcctgattgatcagaaaccgattagcaacctgggcaacattcatgcgagcaacaacattatgtttaaactggatggctgccgcgatacccatcgctatatttggattaaatattttaacctgtttgataaagaactgaacgaaaaagaaattaaagatctgtatgataaccagagcaacagcggcattctgaaagatttttggggcgattatctgcagtatgataaaccgtattatatgctgaacctgtatgatccgaacaaatatgtggatgtgaacaacgtgggcattcgcggctatatgtatctgaaaggcccgcgcggcagcgtgatgaccaccaacatttatctgaacagcagcctgtatcgcggcaccaaatttattattaaaaaatatgcgagcggcaacaaagataacattgtgcgcaacaacgatcgcgtgtatattaacgtggtggtgaaaaacaaagaatatcgcctggcgaccaacgcgagccaggcgggcgtggaaaaaattctgagcgcgctggaaattccggatgtgggcaacctgagccaggtggtggtgatgaaaagcaaaaacgatcagggcattaccaacaaatgcaaaatgaacctgcaggataacaacggcaacgatattggctttattggctttcatcagtttaacaacattgcgaaactggtggcgagcaactggtataaccgccagattgaacgcagcagccgcaccctgggctgcagctgggaatttattccggtggatgatggctggggcgaacgcccgctgtaa

SEQ ID NO: 33 - DNA, 3891 bp, Artificial Sequence
  BoNT/A,  S. typhimurium-modified 3
atgccgtttgtcaacaagcagttcaattacaaagacccagtgaatggtgttgatatcgcgtatatcaaaattcctaatgcgggccagatgcaaccggttaaagcgtttaagatccataacaagatctgggtgatccctgaacgcgatacgtttaccaacccggaagagggcgatctgaaccccccgcccgaagccaaacaggtgccggttagctattacgactcgacgtatctgtccacggataacgaaaaagataattatctgaagggggtcaccaaattgttcgagcggatttactccaccgatctgggtcgcatgctgttaaccagtattgtccgcggtattcctttttggggcgggtccaccatcgataccgaactgaaagttattgatacgaattgcattaatgtcattcagccggatggcagctatcgtagcgaagagcttaatctggttatcattggcccgtcagccgacattatccaattcgagtgcaaaagcttcggccatgaagtgctgaacctcacccgcaacggctacggttctacccaatacattcggttttcgccggattttacgtttgggtttgaggaaagcctggaggtcgacaccaatcctctgctcggcgcgggtaaatttgccacggacccggcggtcacgttagcgcatgaattaattcacgcgggccatcgcctttatggtattgcgatcaacccgaatcgggtgttcaaagtaaataccaacgcttactatgaaatgtctggccttgaagttagcttcgaggaactgcgcacgtttggcgggcacgacgcgaagttcattgatagcctccaggaaaatgagtttcgcttatactattacaacaaattcaaagatatcgcgtcgaccctgaacaaagccaagagtattgtgggtaccacggcgtctcttcagtatatgaagaatgtttttaaggaaaagtacttactgagcgaggatacctccggtaaattttcggtggataaacttaaattcgataagttgtataaaatgttaaccgagatttataccgaagacaacttcgtcaaatttttcaaagtcctgaaccgcaaaacctatcttaattttgacaaagcagtgtttaaaatcaacatcgtaccaaaggtgaactataccatttacgacggcttcaacctgcgcaatacgaacctggcagccaacttcaatggccaaaacaccgagatcaacaatatgaactttaccaagctgaaaaattttaccgggctgtttgagttctataaactgctttgtgtccgtggcatcattaccagcaaaaccaaaagcctggataaaggctataacaaagcgctcaacgatttatgtatcaaggtgaataactgggacctgtttttcagtccgagtgaggacaattttaccaacgacttaaataaaggcgaagagattaccagtgacaccaatattgaggccgctgaagagaacatttctctcgacttgattcagcaatattaccttacgttcaattttgataacgaaccagaaaacatttccattgagaacctgtcgtcagacattatcggccaactggaattgatgccgaacattgaacgttttccgaatggcaaaaagtatgaacttgacaaatatacgatgtttcattatctgcgggcccaggaattcgaacatgggaaaagccggattgccctgaccaacagcgtgaatgaggctttactcaacccttctcgtgtttatacgtttttctcaagcgattacgtcaaaaaggtaaataaagcgacggaggcagcgatgttcctgggttgggtggaacaactcgtgtacgattttacggatgagacgtcggaagtgtcgacgaccgataaaattgcggacattaccattatcattccatatattggcccggcgctgaatattggcaatatgctctataaagacgattttgttggcgccttgattttcagtggcgccgtgattctcctggaatttatcccagagatcgctatccccgtactggggacctttgcattggtatcttatattgctaacaaagtccttaccgtacagaccatcgataacgcgctgagtaagcgcaatgaaaaatgggatgaagtctacaagtatattgtgacgaattggctggcgaaagttaacacccagatcgatctgattcgcaagaaaatgaaagaagcgctggagaatcaagccgaagcaaccaaagcgattatcaactatcagtataaccagtatacggaggaagagaaaaacaatattaattttaacatcgacgatctgagctccaaactgaacgaaagcatcaataaagctatgatcaatattaataagttcctgaaccagtgcagtgtgagctatctgatgaactccatgatcccgtacggggtaaaacgcttggaagacttcgatgcaagtctgaaagatgcgctgttaaaatatatctatgataaccgcggcaccctgatcggccaggtggatcgcctgaaagataaagttaacaataccctttcaaccgacatcccgtttcagctgtcgaaatacgtggataaccagcgcctgttgtcaacctttaccgaatacatcaaaaatatcattaatacgtccatcctgaatttgcgttatgaaagtaaccacctgatcgacctgtcccgctacgcgtcaaaaatcaatattggctctaaggtcaactttgaccccattgacaagaatcagatccagttgttcaacctggaatcatctaagattgaagtcattctgaaaaacgcaattgtgtataactccatgtacgaaaacttctcaacctccttttggattcgcattccgaaatactttaactcgatctccctcaataacgaatacacgattatcaactgcatggaaaacaattctggctggaaagtgtccttaaattatggcgagatcatttggaccctgcaagacacccaggagattaaacaacgtgtggtctttaaatatagccagatgattaatattagcgattatattaaccgctggatttttgttacgatcaccaataaccgtttaaacaatagcaagatttacattaatggtcgcctcatcgatcagaaaccgattagcaacctgggtaacattcacgccagtaataacattatgttcaagctggacggctgtcgtgatacccaccgttacatttggatcaaatactttaacttattcgataaagaactgaatgaaaaagaaatcaaagatctgtacgacaaccagtccaattcgggcattctgaaagatttttggggcgactatctgcaatatgacaaaccctactatatgcttaatctttatgatcccaataaatatgtagatgtaaataacgttggcatccgcggctatatgtatctgaaaggcccgcgtggcagcgtaatgaccacgaatatttatttgaactcatcgttgtaccgcggtaccaaattcattatcaaaaagtacgcgagcgggaataaagataacattgtacgtaataacgatcgtgtttatatcaatgtagtcgtgaaaaacaaagaataccgcctggccacgaatgcttcgcaggccggtgttgaaaaaattttatctgccctggagatcccggacgttggcaacttgtcgcaggtggtcgtgatgaaaagcaagaacgatcagggcatcaccaataagtgcaaaatgaatctgcaggacaataacgggaacgatattggttttatcggcttccatcagtttaataacattgccaaactggtcgcgtcgaattggtacaatcgccagattgaacgtagctcccgcaccctgggctgtagctgggaatttattccggtggatgatggctggggtgagcgtcctctgtaa

SEQ ID NO: 34 - DNA, 3891 bp, Artificial Sequence
  BoNT/A,   P. pastoris-modified 1
atgcctttcgttaataagcagttcaattacaaagaccctgtgaacggagtggatatcgcttatattaagattcctaatgctggtcaaatgcaacctgttaaagccttcaaaatacataacaagatctgggttatccctgaacgcgatacttttacgaaccctgaggaaggtgatttgaaccctccacctgaagctaaacaagttcctgtttcgtattacgactccacttatttatcaaccgacaatgaaaaggataactacctgaaaggcgtcacaaagttgttcgaaagaatttactcaactgatctgggtcgtatgttacttacaagtatcgtgagaggtattccattctgggggggatctactatcgatacagaattgaaagttatcgatactaattgtatcaacgttattcaacccgatggaagctaccgttcagaggaactaaatcttgttatcataggaccctcagctgacataattcagtttgaatgcaagtcctttggacatgaagttttgaatttaacaagaaatggttacggttcgactcaatacattagattctctccagatttcacattcggttttgaagagagtttagaagtcgatacaaacccattgcttggggccggcaaattcgctacagaccccgccgtcactttggcacacgaacttattcatgctggtcaccgactatacggtatagctattaacccaaatagggtttttaaagttaacactaacgcatattacgaaatgagtggactcgaagtaagttttgaagagctaaggactttcgggggtcatgatgctaagtttattgattctctgcaagaaaatgaatttaggctttattactataataagtttaaggatatcgcctccactctgaacaaggccaaatctatcgtgggcacaaccgccagcttgcaatacatgaaaaatgtgttcaaagagaagtacctgttgtcagaagatacgagtggcaagtttagtgtagacaagcttaagttcgacaaactttataagatgctgactgagatttacaccgaagacaatttcgtcaaatttttcaaagttctcaaccggaagacctatttgaattttgacaaagccgtctttaaaataaacattgttcctaaagtcaactataccatttatgacggatttaatttgagaaacaccaacttggctgcaaactttaacgggcaaaatacagagattaataacatgaatttcacgaagttgaagaacttcacaggtttgttcgagttctacaaactactgtgtgtacggggcattataacgtccaagaccaagtctctagataaaggttacaataaagctttgaacgatttgtgcattaaggtaaataactgggacttatttttctctccctctgaggataacttcaccaacgatttaaataaaggcgaggaaatcacttctgacacaaacattgaggctgcagaggaaaatatatctcttgatcttattcagcaatactatttgacgtttaactttgacaacgagccagagaacatttcaatcgaaaatctatcttcggatattatcggccagctggaactaatgccaaatattgagaggttcccaaatggaaagaaatacgagcttgataagtatacgatgtttcattacttacgtgcacaagaattcgaacatggaaagtcaagaatcgctcttactaattccgttaacgaggctctgttgaatccttcaagggtttatacctttttctcatccgattacgttaagaaagtcaataaggctactgaggctgccatgtttctcggatgggtggaacagttggtttatgactttactgacgaaacctccgaggtttccactaccgataaaatagcagatatcactataattataccctacattggacctgctctcaatatcggaaacatgttatataaggatgactttgttggtgctctaattttctccggcgccgtaattctactggagtttattcccgaaatagctatacctgtcttgggaacatttgctctggtttcgtacattgctaataaggttttgactgtccaaacaattgataacgcactgtcaaagcgaaacgagaaatgggacgaggtatataagtatatagtaacgaactggctcgcaaaggtgaatactcaaattgatctcattagaaagaaaatgaaagaagcattggaaaaccaagccgaggctacaaaagcgattataaattaccagtacaaccagtatactgaagaggaaaagaacaatattaattttaatatcgatgacttgagtagcaagctcaatgaatccataaataaggctatgattaacataaacaaattcttgaaccagtgtagcgttagttatttgatgaactctatgataccatatggggttaagagactggaagattttgatgcctcgctgaaggatgcccttttgaagtatatttacgacaatcgaggtaccctgatcggacaagtcgacagactaaaggacaaggtcaacaatactttgtctaccgacatcccatttcaactttctaaatatgttgataaccaaagattgctttctactttcaccgaatacattaaaaatataattaataccagtattttgaatctgagatatgagtctaaccacttaatagatttaagtcgttatgcctcgaagattaacattgggtctaaagtgaactttgatccgatcgacaagaaccagatccagttgtttaatctcgaatcctcaaagattgaggtcattttgaaaaatgcaattgtttataacagcatgtacgaaaacttttccacctctttttggatcagaattccaaagtactttaactcaatttcattgaacaatgagtacactattatcaattgtatggaaaataacagtggctggaaagtttctttaaattacggtgagattatctggacattacaagatactcaagaaatcaaacagagggtcgtatttaagtattctcaaatgattaatatttccgactacatcaatcgttggatcttcgtgacaatcactaataacagactgaataactcaaaaatttatatcaacggtagattaattgatcaaaaaccaatttctaacttgggtaatatccacgcttctaacaatatcatgttcaagttagacggttgtagagatacacaccgttatatctggatcaagtacttcaatcttttcgataaggaactaaacgagaaggagatcaaggacttatacgataatcaaagtaactccggtattcttaaggatttttggggtgactacttgcagtatgacaaaccgtattacatgttgaacttgtacgatccaaacaaatatgtggacgttaataacgtaggaattagaggatacatgtacttaaagggtccaagaggatctgtaatgactacgaatatctacttaaactcctcactctacagaggtaccaaatttataattaagaaatatgcgtccggtaacaaagacaatatagtcagaaataacgatcgagtttacattaacgttgtagtgaaaaataaggaataccgcctagctactaacgcatctcaagcaggtgtcgagaaaatattgtccgctcttgaaattccggacgtgggtaacctgtcgcaagtggtcgttatgaagagtaaaaatgaccagggaattaccaataaatgcaaaatgaaccttcaggataataacggtaatgatatcggatttatcggttttcatcagttcaacaacattgcgaagttagtcgcctctaactggtataacagacaaatcgagagaagctctaggactctaggttgtagctgggagttcattccagtggatgacggatggggtgaacgtccattgtaa

SEQ ID NO: 35 - DNA, 3891 bp, Artificial Sequence
  BoNT/A,   P. pastoris-modified 2
atgccatttgttaacaagcaatttaactacaaggatccagttaacggtgttgatattgcttacattaagattccaaacgctggtcaaatgcaaccagttaaggcttttaagattcataacaagatttgggttattccagaaagagatacttttactaacccagaagaaggtgatttgaacccaccaccagaagctaagcaagttccagtttcttactacgattctacttacttgtctactgataacgaaaaggataactacttgaagggtgttactaagttgtttgaaagaatttactctactgatttgggtagaatgttgttgacttctattgttagaggtattccattttggggtggttctactattgatactgaattgaaggttattgatactaactgtattaacgttattcaaccagatggttcttacagatctgaagaattgaacttggttattattggtccatctgctgatattattcaatttgaatgtaagtcttttggtcatgaagttttgaacttgactagaaacggttacggttctactcaatacattagattttctccagattttacttttggttttgaagaatctttggaagttgatactaacccattgttgggtgctggtaagtttgctactgatccagctgttactttggctcatgaattgattcatgctggtcatagattgtacggtattgctattaacccaaacagagtttttaaggttaacactaacgcttactacgaaatgtctggtttggaagtttcttttgaagaattgagaacttttggtggtcatgatgctaagtttattgattctttgcaagaaaacgaatttagattgtactactacaacaagtttaaggatattgcttctactttgaacaaggctaagtctattgttggtactactgcttctttgcaatacatgaagaacgtttttaaggaaaagtacttgttgtctgaagatacttctggtaagttttctgttgataagttgaagtttgataagttgtacaagatgttgactgaaatttacactgaagataactttgttaagttttttaaggttttgaacagaaagacttacttgaactttgataaggctgtttttaagattaacattgttccaaaggttaactacactatttacgatggttttaacttgagaaacactaacttggctgctaactttaacggtcaaaacactgaaattaacaacatgaactttactaagttgaagaactttactggtttgtttgaattttacaagttgttgtgtgttagaggtattattacttctaagactaagtctttggataagggttacaacaaggctttgaacgatttgtgtattaaggttaacaactgggatttgtttttttctccatctgaagataactttactaacgatttgaacaagggtgaagaaattacttctgatactaacattgaagctgctgaagaaaacatttctttggatttgattcaacaatactacttgacttttaactttgataacgaaccagaaaacatttctattgaaaacttgtcttctgatattattggtcaattggaattgatgccaaacattgaaagatttccaaacggtaagaagtacgaattggataagtacactatgtttcattacttgagagctcaagaatttgaacatggtaagtctagaattgctttgactaactctgttaacgaagctttgttgaacccatctagagtttacacttttttttcttctgattacgttaagaaggttaacaaggctactgaagctgctatgtttttgggttgggttgaacaattggtttacgattttactgatgaaacttctgaagtttctactactgataagattgctgatattactattattattccatacattggtccagctttgaacattggtaacatgttgtacaaggatgattttgttggtgctttgattttttctggtgctgttattttgttggaatttattccagaaattgctattccagttttgggtacttttgctttggtttcttacattgctaacaaggttttgactgttcaaactattgataacgctttgtctaagagaaacgaaaagtgggatgaagtttacaagtacattgttactaactggttggctaaggttaacactcaaattgatttgattagaaagaagatgaaggaagctttggaaaaccaagctgaagctactaaggctattattaactaccaatacaaccaatacactgaagaagaaaagaacaacattaactttaacattgatgatttgtcttctaagttgaacgaatctattaacaaggctatgattaacattaacaagtttttgaaccaatgttctgtttcttacttgatgaactctatgattccatacggtgttaagagattggaagattttgatgcttctttgaaggatgctttgttgaagtacatttacgataacagaggtactttgattggtcaagttgatagattgaaggataaggttaacaacactttgtctactgatattccatttcaattgtctaagtacgttgataaccaaagattgttgtctacttttactgaatacattaagaacattattaacacttctattttgaacttgagatacgaatctaaccatttgattgatttgtctagatacgcttctaagattaacattggttctaaggttaactttgatccaattgataagaaccaaattcaattgtttaacttggaatcttctaagattgaagttattttgaagaacgctattgtttacaactctatgtacgaaaacttttctacttctttttggattagaattccaaagtactttaactctatttctttgaacaacgaatacactattattaactgtatggaaaacaactctggttggaaggtttctttgaactacggtgaaattatttggactttgcaagatactcaagaaattaagcaaagagttgtttttaagtactctcaaatgattaacatttctgattacattaacagatggatttttgttactattactaacaacagattgaacaactctaagatttacattaacggtagattgattgatcaaaagccaatttctaacttgggtaacattcatgcttctaacaacattatgtttaagttggatggttgtagagatactcatagatacatttggattaagtactttaacttgtttgataaggaattgaacgaaaaggaaattaaggatttgtacgataaccaatctaactctggtattttgaaggatttttggggtgattacttgcaatacgataagccatactacatgttgaacttgtacgatccaaacaagtacgttgatgttaacaacgttggtattagaggttacatgtacttgaagggtccaagaggttctgttatgactactaacatttacttgaactcttctttgtacagaggtactaagtttattattaagaagtacgcttctggtaacaaggataacattgttagaaacaacgatagagtttacattaacgttgttgttaagaacaaggaatacagattggctactaacgcttctcaagctggtgttgaaaagattttgtctgctttggaaattccagatgttggtaacttgtctcaagttgttgttatgaagtctaagaacgatcaaggtattactaacaagtgtaagatgaacttgcaagataacaacggtaacgatattggttttattggttttcatcaatttaacaacattgctaagttggttgcttctaactggtacaacagacaaattgaaagatcttctagaactttgggttgttcttgggaatttattccagttgatgatggttggggtgaaagaccattgtaa

SEQ ID NO: 36 - DNA, 3891 bp, Artificial Sequence
  BoNT/A,   P. pastoris-modified 3
atgccattcgttaacaaacaatttaactataaagatcctgtgaacggtgtagatatcgcctacattaagattcctaacgctggtcagatgcagccagttaaggcctttaaaattcataataaaatttgggttattccagaaagagatacctttacaaatccagaagagggagacttgaatcctccacctgaggctaaacaagttcctgtcagctattacgactccacttacttgtcaactgataacgaaaaggataattacttgaagggtgtgactaaattgttcgagagaatctacagtactgatctgggtcgtatgctgttgaccagtatcgttagaggtatccctttctggggaggttccacaattgacacagaattgaaggtaatcgatacaaattgtattaatgtcattcagccagacggttcctacaggagtgaagagctgaatttggttatcattggacccagtgctgatattatccaatttgagtgtaaatctttcggtcacgaagtcctaaacttgactagaaatggttatggcagtacccagtacatccgattttcaccagactttacctttggtttcgaagagtccttggaggtggatactaatccattattgggtgctggcaagtttgctaccgatcctgcagtgactctagctcacgaacttattcatgctggccacagattgtatggtattgccattaacccaaatagagtttttaaggttaacacaaacgcctactatgaaatgtcaggacttgaagttagttttgaagagttgaggaccttcggtggacacgacgccaagtttattgattctctacaagagaacgaattcagactatactattacaacaaatttaaggatattgcttcgactcttaacaaggcaaaatcaatagtaggtactaccgcatctctgcaatatatgaagaatgtgtttaaggaaaagtacctgttatcagaagacacttctggtaagttctctgtagataagctgaaatttgataaactatacaagatgttgacagaaatatatacagaggataacttcgtaaagtttttcaaagttctaaaccgaaaaacttatctgaacttcgataaggcagtctttaaaattaatatcgttccaaaggttaactacaccatttacgatggttttaacctgagaaatacaaatttggctgcaaatttcaacggccaaaacactgaaattaataacatgaactttaccaagctaaaaaatttcactggattgtttgagttttacaaacttctatgcgttagaggtattatcacttctaagactaaatctttggacaaaggatataacaaggctttgaacgatctttgtattaaagttaataactgggacttgttcttttccccctcggaagataacttcaccaatgatctaaataaaggcgaggaaatcacttctgataccaacattgaggcagctgaagagaacatctccttggacttaatacaacagtactatcttactttcaattttgacaacgagcctgaaaacatatcgattgaaaatttgtcctctgacattatcggacaacttgaactgatgcccaacatcgaaagatttccaaatggtaaaaagtacgaattagacaaatatactatgttccattatcttagggctcaagagtttgagcatggtaagtcaagaatagccttgactaactcagtaaatgaagctttgctaaacccatcaagggtctatactttcttttcaagcgattacgttaaaaaggttaacaaagctaccgaagcagctatgtttctaggatgggttgaacaattggtgtacgacttcactgatgagacttctgaagttagcactacagacaaaatcgctgacataaccattatcattccttacattggtccagcccttaacattggtaacatgttgtacaaggacgattttgttggtgctttgattttcagcggagctgttattcttctggagttcatcccagaaattgcaataccagtcttaggtacatttgctctggtctcttatattgccaataaggtcttgactgtgcaaactattgacaatgctttgagcaaacgtaacgagaagtgggacgaggtctataagtacattgtcaccaactggttagctaaggtaaacacacagatagacttgattcgtaagaaaatgaaagaagcccttgaaaaccaagcagaggcaacaaaggctataattaactaccaatataaccagtataccgaagaggaaaaaaacaatataaatttcaatattgatgacctttcctctaaactgaatgagtctataaacaaagctatgattaacattaacaagttccttaatcagtgctctgtttcctacttaatgaattccatgattccttatggtgtcaagagattggaggactttgatgcatcattgaaggatgcactgctaaaatacatctatgataatagaggcactcttatcggtcaagtggacagattaaaagacaaggttaacaatactttgtcgacagatattccttttcagctttctaagtatgtggataatcaacgattattgtcgacttttactgagtacattaagaatatcataaatacttccatcctaaatctgagatatgaatctaaccatttgatcgatttatcaagatacgcttctaagattaatattggcagtaaggtaaatttcgatcccatagataagaatcaaatccagttgtttaatctggagtcctctaagattgaagttatcttgaagaacgccattgtgtacaactcgatgtatgagaacttcagtacaagtttctggattaggatccccaaatactttaatagtatttcattgaataacgagtacactataatcaactgcatggaaaacaatagtggttggaaagtgtctttgaactatggagaaatcatttggacattgcaagacactcaagaaatcaagcaacgtgtagtctttaagtattcacagatgatcaatataagcgattacatcaacaggtggatttttgtcactattacaaataacagattgaataactcgaagatatacataaatggacgattgattgatcaaaaacccatttcaaacttaggtaacattcatgcctccaacaatatcatgttcaagctggacggatgtcgtgatacccacagatatatttggatcaaatatttcaacttgtttgataaagaattaaatgaaaaagagataaaagacttatacgataaccaatctaattccggaatattaaaggatttctggggagattatttgcaatatgacaaaccttactatatgttaaatctttacgaccctaacaaatatgtagatgttaacaatgttggtattagaggctacatgtacctgaaaggtccacgtggtagcgtgatgactaccaatatttatttgaactcctctttatacaggggtactaaatttattataaagaaatatgcttcaggaaataaggataatatagttagaaataacgatcgtgtctacatcaacgttgtcgtgaagaacaaggaatacagattggccaccaatgcttctcaagccggtgtagagaagatcttatctgctctggagatcccagacgtgggtaacttgtctcaggttgtcgttatgaagtccaaaaatgaccagggtatcactaacaagtgtaaaatgaatcttcaggacaataacggaaacgatataggattcattggattccatcaattcaataacattgccaagcttgtcgctagtaattggtacaatagacagatcgaaagatctagtagaacattaggttgttcctgggagtttatcccagttgatgacggatggggcgaaagaccattgtaa

SEQ ID NO: 37 - DNA, 3891 bp, Artificial Sequence
  BoNT/A,  S. cerevisiae-modified 1
atgccttttgtgaataagcagtttaattataaagacccagtgaatggggttgacatcgcctatataaagattccaaacgctggtcagatgcaaccagtcaaagcctttaagattcataataaaatttgggtcattccagaacgagatacttttactaatccggaggaaggcgatctgaatccaccgccagaggcgaaacaagttccagtttcctattacgattcaacctatttgagcacagataatgaaaaggataactatctgaaaggggtaactaagttatttgaaaggatttactccactgatcttgggaggatgttattgacctctattgtaagaggaattccattttggggtgggagcacgattgataccgaacttaaggtaatagatactaattgtataaacgtgattcaaccagatggatcatatagatctgaggaactaaatctggttataattggcccatcagcggatattatacagttcgagtgtaaatcatttggtcatgaagttttaaacttgacacgtaatggctacggcagtactcaatatataagattttcccccgatttcacttttggtttcgaagagtcactagaagtggacacgaaccctctactgggggcgggtaagtttgccactgatccggcagttacgcttgctcatgaattaattcacgccggtcatagattatacggcattgcaattaaccctaatagggtatttaaagtcaatactaacgcatattacgaaatgtcaggattggaggtatcctttgaagagcttagaacgttcggaggtcatgatgcaaaatttatcgattcgttacaagaaaacgaattcaggttgtattactataacaagtttaaagacattgctagtacattaaacaaggccaagtctatagtgggaacaaccgctagtttgcaatacatgaagaacgtcttcaaagaaaaatacttattgtccgaggacacttctggtaagtttagtgtagacaagttaaaattcgataaactgtataagatgttgacagaaatttacacggaagataactttgtcaaattctttaaagtcctgaatagaaagacctacttaaatttcgataaagcagtgtttaagattaacattgttccaaaagttaattatacgatctacgatggctttaacctcagaaacaccaatctagctgccaatttcaacggtcaaaatacagaaattaataacatgaacttcactaagttaaaaaatttcaccggtttatttgaattttacaaactattgtgcgtaaggggcattatcacgtcaaaaacaaaaagtttggataaggggtacaataaagctttgaacgacctttgcatcaaagtcaataactgggatttgttcttttctccttcagaggataacttcacaaatgaccttaataagggtgaagagattacttctgatacaaatatcgaagctgcagaagagaacatttctttagatctaattcaacagtactatttgacttttaacttcgataatgagcctgagaatatatcaattgaaaatttgagttctgatatcattggtcaactggagttaatgcctaacatcgaaagatttcccaacggcaaaaagtatgagttggacaagtacacaatgttccactatctgagggcacaagaatttgaacacggtaagtccaggatcgctttgaccaactcagttaacgaagccttacttaatccatccagagtgtatacttttttctcgagtgactatgtgaagaaagtaaataaagcaacagaagctgccatgtttttgggatgggtagaacaattggtatatgattttactgatgaaaccagcgaggtttctactacagacaaaattgccgatatcactatcataattccatatataggtccggctctaaacataggtaacatgttgtataaagatgactttgtaggagctttaattttctcaggagctgttattctattagaatttattcctgaaatcgccattcctgttctaggtacattcgcgctagtctcctacatcgcaaacaaagtgctaactgtccaaacaatagataatgctttgtctaaaagaaatgaaaagtgggacgaagtttacaaatatattgttactaattggctggctaaggtgaatacacaaatagacttgatccgtaagaaaatgaaagaagctcttgaaaatcaggccgaagcaacgaaggcaataatcaattatcaatataatcaatacacagaagaggaaaaaaataacataaactttaatattgatgacctatcatctaaattaaacgagtccataaataaggcaatgatcaacataaacaaattccttaatcaatgttctgtctcttatctgatgaattccatgatcccctacggtgttaaacggttagaagacttcgacgcttctttgaaggatgctttattgaaatacatatatgataaccgcggcacattaataggtcaagttgatagactgaaagataaagttaataacactttgagcactgatattccatttcaactctctaaatacgtagataatcagagactccttagcacgtttaccgagtatataaagaatattataaatacctcgatactcaatctccgctatgaatccaaccatcttatcgacctttcaagatacgcatcgaaaattaatattggtagtaaagttaatttcgaccccatagataaaaatcaaatccaactattcaacctagagtcttcgaagattgaggttattctgaaaaatgccatcgtgtataatagcatgtatgagaattttagcactagtttctggattagaatacctaaatattttaactccatttcattgaataacgaatacacgattatcaactgtatggaaaacaattcaggttggaaggtgtcgttaaactatggtgaaattatctggactctgcaggacacccaagaaatcaagcagagagtcgtttttaagtatagtcagatgattaacataagtgattacattaataggtggatattcgtgactattacaaataaccgtttgaacaattcgaaaatctatattaatggtagattaatcgatcaaaagcctatttctaatttgggtaatattcacgcttcaaataacattatgttcaagttagacggttgcagagatacacatagatacatttggatcaaatatttcaatttatttgacaaagagttaaacgaaaaggaaattaaagatttgtacgacaatcaatctaactccggtatattaaaagacttttggggcgattatttacagtacgataagccttattacatgcttaacctatacgaccctaataagtatgtcgatgtaaataacgtcggaatcagaggttacatgtatttgaagggtccaagagggtctgtcatgacaaccaacatatacctaaactcatccctttaccgtggtacaaaattcatcattaaaaagtatgcttctggaaataaagataatatagttcgtaataacgatcgagtatatataaatgttgtcgttaagaataaagaatatcgtcttgcaaccaatgcgagtcaagcgggagttgaaaagatattgtctgctttggaaatacccgatgttggaaacttaagccaggtagtggttatgaaaagcaaaaatgaccaaggaatcaccaataagtgtaaaatgaatctccaagacaataacgggaatgatatcggctttattggattccatcagtttaataatattgcaaaattagttgcatcgaattggtacaatagacaaatcgaaaggtctagtcgaactttgggttgttcatgggaatttatacccgttgatgatggttggggcgaacggccattataa

SEQ ID NO: 38 - DNA, 3891 bp, Artificial Sequence
  BoNT/A,  S. cerevisiae-modified 2
atgccatttgttaataaacaatttaattataaagatccagttaatggtgttgatattgcttatattaaaattccaaatgctggtcaaatgcaaccagttaaagcttttaaaattcataataaaatttgggttattccagaaagagatacttttactaatccagaagaaggtgatttgaatccaccaccagaagctaaacaagttccagtttcttattatgattctacttatttgtctactgataatgaaaaagataattatttgaaaggtgttactaaattgtttgaaagaatttattctactgatttgggtagaatgttgttgacttctattgttagaggtattccattttggggtggttctactattgatactgaattgaaagttattgatactaattgtattaatgttattcaaccagatggttcttatagatctgaagaattgaatttggttattattggtccatctgctgatattattcaatttgaatgtaaatcttttggtcatgaagttttgaatttgactagaaatggttatggttctactcaatatattagattttctccagattttacttttggttttgaagaatctttggaagttgatactaatccattgttgggtgctggtaaatttgctactgatccagctgttactttggctcatgaattgattcatgctggtcatagattgtatggtattgctattaatccaaatagagtttttaaagttaatactaatgcttattatgaaatgtctggtttggaagtttcttttgaagaattgagaacttttggtggtcatgatgctaaatttattgattctttgcaagaaaatgaatttagattgtattattataataaatttaaagatattgcttctactttgaataaagctaaatctattgttggtactactgcttctttgcaatatatgaaaaatgtttttaaagaaaaatatttgttgtctgaagatacttctggtaaattttctgttgataaattgaaatttgataaattgtataaaatgttgactgaaatttatactgaagataattttgttaaattttttaaagttttgaatagaaaaacttatttgaattttgataaagctgtttttaaaattaatattgttccaaaagttaattatactatttatgatggttttaatttgagaaatactaatttggctgctaattttaatggtcaaaatactgaaattaataatatgaattttactaaattgaaaaattttactggtttgtttgaattttataaattgttgtgtgttagaggtattattacttctaaaactaaatctttggataaaggttataataaagctttgaatgatttgtgtattaaagttaataattgggatttgtttttttctccatctgaagataattttactaatgatttgaataaaggtgaagaaattacttctgatactaatattgaagctgctgaagaaaatatttctttggatttgattcaacaatattatttgacttttaattttgataatgaaccagaaaatatttctattgaaaatttgtcttctgatattattggtcaattggaattgatgccaaatattgaaagatttccaaatggtaaaaaatatgaattggataaatatactatgtttcattatttgagagctcaagaatttgaacatggtaaatctagaattgctttgactaattctgttaatgaagctttgttgaatccatctagagtttatacttttttttcttctgattatgttaaaaaagttaataaagctactgaagctgctatgtttttgggttgggttgaacaattggtttatgattttactgatgaaacttctgaagtttctactactgataaaattgctgatattactattattattccatatattggtccagctttgaatattggtaatatgttgtataaagatgattttgttggtgctttgattttttctggtgctgttattttgttggaatttattccagaaattgctattccagttttgggtacttttgctttggtttcttatattgctaataaagttttgactgttcaaactattgataatgctttgtctaaaagaaatgaaaaatgggatgaagtttataaatatattgttactaattggttggctaaagttaatactcaaattgatttgattagaaaaaaaatgaaagaagctttggaaaatcaagctgaagctactaaagctattattaattatcaatataatcaatatactgaagaagaaaaaaataatattaattttaatattgatgatttgtcttctaaattgaatgaatctattaataaagctatgattaatattaataaatttttgaatcaatgttctgtttcttatttgatgaattctatgattccatatggtgttaaaagattggaagattttgatgcttctttgaaagatgctttgttgaaatatatttatgataatagaggtactttgattggtcaagttgatagattgaaagataaagttaataatactttgtctactgatattccatttcaattgtctaaatatgttgataatcaaagattgttgtctacttttactgaatatattaaaaatattattaatacttctattttgaatttgagatatgaatctaatcatttgattgatttgtctagatatgcttctaaaattaatattggttctaaagttaattttgatccaattgataaaaatcaaattcaattgtttaatttggaatcttctaaaattgaagttattttgaaaaatgctattgtttataattctatgtatgaaaatttttctacttctttttggattagaattccaaaatattttaattctatttctttgaataatgaatatactattattaattgtatggaaaataattctggttggaaagtttctttgaattatggtgaaattatttggactttgcaagatactcaagaaattaaacaaagagttgtttttaaatattctcaaatgattaatatttctgattatattaatagatggatttttgttactattactaataatagattgaataattctaaaatttatattaatggtagattgattgatcaaaaaccaatttctaatttgggtaatattcatgcttctaataatattatgtttaaattggatggttgtagagatactcatagatatatttggattaaatattttaatttgtttgataaagaattgaatgaaaaagaaattaaagatttgtatgataatcaatctaattctggtattttgaaagatttttggggtgattatttgcaatatgataaaccatattatatgttgaatttgtatgatccaaataaatatgttgatgttaataatgttggtattagaggttatatgtatttgaaaggtccaagaggttctgttatgactactaatatttatttgaattcttctttgtatagaggtactaaatttattattaaaaaatatgcttctggtaataaagataatattgttagaaataatgatagagtttatattaatgttgttgttaaaaataaagaatatagattggctactaatgcttctcaagctggtgttgaaaaaattttgtctgctttggaaattccagatgttggtaatttgtctcaagttgttgttatgaaatctaaaaatgatcaaggtattactaataaatgtaaaatgaatttgcaagataataatggtaatgatattggttttattggttttcatcaatttaataatattgctaaattggttgcttctaattggtataatagacaaattgaaagatcttctagaactttgggttgttcttgggaatttattccagttgatgatggttggggtgaaagaccattgtaa

SEQ ID NO: 39 - DNA, 3891 bp, Artificial Sequence
  BoNT/A,  S. cerevisiae-modified 3
atgccttttgttaataaacagttcaactataaggatcccgtgaacggtgtagatattgcctacattaaaattcctaacgcaggtcaaatgcaacctgtcaaggcttttaagattcataataaaatttgggtcatacctgaaagggacacctttacgaatccagaggaaggtgacttgaacccacctcccgaagctaaacaagtaccagtaagttattacgattccacctacttgtcaactgacaatgaaaaggataattacttgaaaggagtcacgaagcttttcgaaagaatttatagtacggatttaggccgtatgctgcttacttctatcgtaagaggtataccattttggggtggaagcacgatagatacagagcttaaagtcattgatactaactgcatcaacgttatacaaccagacggttcatataggtctgaagagcttaatttagttatcataggtccatcagccgacataattcaatttgaatgtaagagtttcggacacgaagtgttgaatttgaccagaaacggctatggaagtactcaatatatcagattcagcccagattttacttttggttttgaggaatctttggaagttgatactaatcctttgcttggtgctggcaagtttgcaactgacccagcagtaacattagcccacgaattgatacatgccggtcacaggctgtatggtatcgctattaatccaaacagagtattcaaagtgaataccaacgcttattacgaaatgtctggtcttgaagtcagctttgaagagttgagaactttcggcggtcatgatgcaaaatttattgatagcctgcaggagaatgagttccgtttgtactattacaataagtttaaggatatagcctccactttaaacaaagctaaatcaatcgttggtactaccgccagtctacaatatatgaagaatgtgtttaaagaaaagtatttactatccgaggacacgtctggcaagtttagtgttgacaagttgaaatttgataagttatataaaatgttaacagaaatttataccgaggataactttgtaaaatttttcaaagtcttgaatagaaagacctacttgaatttcgataaagctgtcttcaaaataaatatcgttcccaaagtcaactatactatatacgacggttttaacttaagaaacactaatttagctgcaaacttcaacggtcaaaacaccgaaatcaataacatgaatttcacaaaattgaagaatttcacaggattgttcgagttttataaattgctatgcgttagaggtatcattacatccaagactaaatctttagacaagggttacaataaggcattgaatgatttatgtattaaagtgaacaattgggatttatttttctccccatcagaggataactttacaaacgatttaaataaaggtgaagagataacctctgacactaacatcgaagctgccgaagagaacatctctttagatttgattcagcaatattaccttacttttaatttcgataatgaaccagaaaatatttccatagaaaacttatcttcagatattatcggtcaacttgaattaatgcctaatatcgaaagatttcccaatggaaaaaagtacgaactggacaaatacacaatgtttcattatttgagagctcaagaatttgagcatggaaaatccagaatagctttgaccaactctgtaaatgaagcccttttaaacccaagtcgtgtctacacctttttctcaagtgattacgttaagaaagttaataaagcaaccgaagctgcaatgttcctgggttgggtggaacaactagtgtatgattttacggatgagacttccgaagtatccactacggataaaatagctgacatcactattataatcccatacatcggtccagcactgaatattggtaacatgttatataaggacgatttcgttggtgctttgatcttctcaggcgctgttattttgcttgaatttatccccgaaattgctattcctgttctaggaacatttgctctagtatcttatattgctaataaagttttaacagttcaaacgatcgataacgctctgtccaaaagaaatgaaaagtgggacgaggtatacaagtatatcgttacaaattggttagcaaaagttaatacccaaatcgacttgattcgtaaaaagatgaaagaggccttagaaaatcaggcagaggctactaaggctattatcaactatcaatataatcagtacacagaagaggaaaaaaacaatattaacttcaatatagacgatttgtcttcgaaattaaatgaatccattaataaagctatgatcaatattaacaaattcctaaatcagtgctcagtttcgtacttaatgaattctatgattccttatggcgtgaaaaggttggaggacttcgatgcttccttgaaagatgcactattaaaatacatttatgacaatagaggaactctaattggtcaagtggatagattaaaggataaagtcaataacactctttcaacagatattccatttcaattgtctaaatatgtagataatcaacgtctgttatccacgttcacagaatacataaagaatataattaacaccagtattttgaatcttagatatgaatcaaatcatctaatagatctgtcgagatacgcttcgaagattaatataggctcgaaagttaattttgatccaatcgataagaaccagatacaactttttaatctagaatcgtctaaaatagaggtcattttgaagaatgcaattgtttataacagcatgtacgaaaatttctctacatctttctggattagaattccaaaatattttaacagtatttctttgaacaatgagtacacgatcattaattgtatggaaaataacagcggctggaaagtatctctaaattatggcgaaatcatttggacattacaagatacccaggaaattaagcagagagttgtctttaaatacagtcaaatgatcaatatcagcgattacattaaccgttggatttttgtgactataacaaataacagactgaacaatagcaagatttatattaacggcagattgatagatcaaaaacctatatcaaatttgggaaacatccatgcttcaaataacatcatgttcaagctggatggctgtagagacactcatagatatatatggattaaatatttcaacttgtttgataaagagctaaatgaaaaggaaataaaggatctttatgacaaccaatctaactctggtatactgaaggacttttggggtgattatctacaatatgataagccttactatatgttaaacttgtacgaccccaataaatatgttgatgtcaataacgtgggtataagaggttatatgtacttaaaaggtccaaggggatccgtgatgactacaaatatttacttgaattcaagtttatacagaggaacaaaatttattatcaagaaatatgcatcaggaaataaggacaacattgttaggaataacgatagggtttacataaacgtcgttgtgaaaaataaagaatatagattggcaacaaacgcctcacaagccggtgtagaaaaaatactttctgcactggaaattccagacgtcggtaatctatcgcaagttgtggttatgaaaagcaagaatgatcaaggaataactaataagtgtaagatgaatctacaggacaataacggtaacgatattggttttattggttttcaccagtttaataacattgctaagttagttgcctcaaattggtacaataggcagatagaaagatcgtcaaggacattgggttgtagttgggaattcattcctgtagacgatggttggggtgaaagaccattgtaa

SEQ ID NO: 40 - DNA, 3891 bp, Artificial Sequence
  BoNT/A,   S. pombe-modified 1
atgcctttcgttaacaagcaatttaactataaagatcctgtaaatggtgttgatattgcttatattaaaattccgaatgcaggtcaaatgcaaccggttaaagcttttaaaatacacaacaagatctgggttattccagaaagagatactttcactaaccccgaagagggggatttgaatccacccccagaggcgaagcaggtaccagtaagttattacgactcaacttatttgtccactgataatgaaaaggataattaccttaaaggtgtgaccaagctgtttgagagaatttacagtactgatctaggtcgtatgttacttacgtctattgtacgcgggattccgttctgggggggatccacgatagatacagagttgaaagttattgacaccaactgtattaacgtgattcaacctgacggatcttatcgatcagaagagcttaatcttgttattataggaccttctgcagacattatccaattcgaatgtaagagttttggtcatgaggtcctcaaccttactagaaatggctatggttctacacaatatatcagattttctccagattttacgttcggatttgaagagagtcttgaagttgatactaatccattgttaggcgctggaaaattcgctacagatcccgccgtaacccttgctcatgaattaatccatgcaggacacagattgtatggtattgctataaaccctaaccgtgtctttaaggttaatacaaatgcgtactatgaaatgtctggccttgaggtatcattcgaagagttgcgtactttcggcggacatgatgctaaattcattgatagcttacaggaaaacgaatttcgtttgtattactataataagttcaaggatattgcttcaactttaaataaagctaaatctattgttggaactaccgcttcattgcaatatatgaaaaatgtatttaaagaaaagtatcttttgtccgaagacacctctggtaaattttctgtagataaattaaagtttgataagctatacaaaatgctcacggaaatatacactgaagataactttgttaagtttttcaaagttcttaatcggaaaacgtacttaaatttcgacaaagcagtttttaaaatcaatattgtaccaaaagttaattatacaatctatgatggtttcaacttgcggaatactaacctcgcagccaattttaatggtcaaaacaccgaaattaataacatgaactttactaaacttaagaattttacgggtctctttgaattctacaaattattgtgcgtccgtgggataatcacctctaaaactaaatccttggataaaggttataataaagctctgaatgatttgtgcattaaagttaacaattgggatttgtttttctctccttccgaggacaatttcactaatgatctcaacaaaggagaagagattactagcgataccaatatcgaagctgcagaagagaatatttcccttgatcttattcaacagtattaccttacatttaactttgataacgagccagaaaatattagtattgagaatctctcgagtgatattatcggtcaacttgaattaatgcctaatattgagcgatttcccaatggtaagaaatacgaacttgataagtacacaatgtttcattatttacgcgcacaggagtttgaacatggtaagtcacgaattgcgttgactaatagtgtcaatgaagcattgttaaatcctagccgagtgtatacatttttcagctctgactatgttaagaaagtgaataaggcaacagaggctgcaatgtttttaggttgggtggaacaattagtctacgatttcacagatgaaacttctgaagtttctaccacagacaaaatagccgatattaccattataattccttatattggccctgccttgaatataggtaatatgttatataaagacgattttgtcggcgcattaattttttcaggcgcagttatcttattggagtttattcctgaaatcgctatacctgttttaggtacttttgctttagtgagttatatagctaataaggttcttacggttcagactattgacaacgctctttctaaacgtaatgaaaaatgggatgaggtctacaaatacatagtgactaattggctagctaaggtcaatactcagatcgacctaataagaaagaaaatgaaagaagccttagagaatcaagctgaagccactaaagcaattataaactatcaatataatcagtatacagaagaggaaaaaaataacataaacttcaacattgatgacttaagctctaaactgaatgaaagcattaacaaagcgatgattaatattaacaaatttctcaatcaatgttcagtttcgtatttgatgaacagtatgatcccgtatggtgttaaacgtctagaagactttgatgcctcattaaaagatgccttgcttaaatatatttacgataatcgaggaactctaataggtcaggttgatcggctgaaagacaaagttaataacaccctctctactgatatccccttccaattgtcgaaatacgttgataaccagcgtcttttatcgacatttactgaatacattaaaaatattatcaatacttctattttgaaccttcgttatgaaagcaatcatttgatcgatttgtcacgctatgcttcaaagatcaacatcggatctaaagtcaactttgatcctattgataaaaatcagattcaattatttaaccttgaatcatctaagatcgaagtaatccttaagaatgctattgtttataattcaatgtatgaaaatttttctacttcgttttggattaggattccaaagtactttaattccatctctctgaacaatgaatatacaatcataaattgtatggaaaataactctggctggaaggtatccctaaattatggagaaataatttggaccttacaagatactcaagagattaaacaaagagttgtgtttaaatattcgcaaatgattaacatttctgattatataaatagatggatttttgttaccataacaaataaccgtttgaataactccaagatttacattaatggccgtttgattgatcaaaagccaattagcaatctgggcaacatccatgcttctaataacataatgtttaaactggacggatgtagagatactcaccgatacatttggatcaagtattttaatttatttgataaagaacttaatgaaaaagaaataaaggacttatatgataatcaatctaattcaggtattctaaaggatttttggggtgactatttgcaatatgacaaaccttattacatgttaaatctttatgatcccaataaatatgtcgatgtcaataacgttgggataaggggttacatgtatctaaaagggccccgcggatccgtaatgacaaccaacatttatcttaattcatcgttatatcgtggtacaaaatttataattaaaaagtatgctagtggtaacaaggataacattgtgcgaaataacgaccgcgtttacattaacgtcgttgtaaagaataaagaatacagacttgctacgaatgctagtcaggccggtgtagaaaagattttaagtgctctggagatccctgatgtcggcaatttgagtcaagttgtagttatgaagtcaaaaaatgaccaaggtataacaaataagtgtaaaatgaatcttcaagataataatggaaatgacattggatttattggatttcatcaatttaataatattgcaaagcttgttgccagtaattggtacaataggcaaatagagaggtcttcccgtacactaggatgctcttgggaatttattcctgtggacgatggatggggagaacgtcctttataa

SEQ ID NO: 41 - DNA, 3891 bp, Artificial Sequence
  BoNT/A,   S. pombe-modified 2
atgccttttgttaataaacaatttaattataaagatcctgttaatggtgttgatattgcttatattaaaattcctaatgctggtcaaatgcaacctgttaaagcttttaaaattcataataaaatttgggttattcctgaacgtgatacttttactaatcctgaagaaggtgatttaaatcctcctcctgaagctaaacaagttcctgtttcttattatgattctacttatttatctactgataatgaaaaagataattatttaaaaggtgttactaaattatttgaacgtatttattctactgatttaggtcgtatgttattaacttctattgttcgtggtattcctttttggggtggttctactattgatactgaattaaaagttattgatactaattgtattaatgttattcaacctgatggttcttatcgttctgaagaattaaatttagttattattggtccttctgctgatattattcaatttgaatgtaaatcttttggtcatgaagttttaaatttaactcgtaatggttatggttctactcaatatattcgtttttctcctgattttacttttggttttgaagaatctttagaagttgatactaatcctttattaggtgctggtaaatttgctactgatcctgctgttactttagctcatgaattaattcatgctggtcatcgtttatatggtattgctattaatcctaatcgtgtttttaaagttaatactaatgcttattatgaaatgtctggtttagaagtttcttttgaagaattacgtacttttggtggtcatgatgctaaatttattgattctttacaagaaaatgaatttcgtttatattattataataaatttaaagatattgcttctactttaaataaagctaaatctattgttggtactactgcttctttacaatatatgaaaaatgtttttaaagaaaaatatttattatctgaagatacttctggtaaattttctgttgataaattaaaatttgataaattatataaaatgttaactgaaatttatactgaagataattttgttaaattttttaaagttttaaatcgtaaaacttatttaaattttgataaagctgtttttaaaattaatattgttcctaaagttaattatactatttatgatggttttaatttacgtaatactaatttagctgctaattttaatggtcaaaatactgaaattaataatatgaattttactaaattaaaaaattttactggtttatttgaattttataaattattatgtgttcgtggtattattacttctaaaactaaatctttagataaaggttataataaagctttaaatgatttatgtattaaagttaataattgggatttatttttttctccttctgaagataattttactaatgatttaaataaaggtgaagaaattacttctgatactaatattgaagctgctgaagaaaatatttctttagatttaattcaacaatattatttaacttttaattttgataatgaacctgaaaatatttctattgaaaatttatcttctgatattattggtcaattagaattaatgcctaatattgaacgttttcctaatggtaaaaaatatgaattagataaatatactatgtttcattatttacgtgctcaagaatttgaacatggtaaatctcgtattgctttaactaattctgttaatgaagctttattaaatccttctcgtgtttatacttttttttcttctgattatgttaaaaaagttaataaagctactgaagctgctatgtttttaggttgggttgaacaattagtttatgattttactgatgaaacttctgaagtttctactactgataaaattgctgatattactattattattccttatattggtcctgctttaaatattggtaatatgttatataaagatgattttgttggtgctttaattttttctggtgctgttattttattagaatttattcctgaaattgctattcctgttttaggtacttttgctttagtttcttatattgctaataaagttttaactgttcaaactattgataatgctttatctaaacgtaatgaaaaatgggatgaagtttataaatatattgttactaattggttagctaaagttaatactcaaattgatttaattcgtaaaaaaatgaaagaagctttagaaaatcaagctgaagctactaaagctattattaattatcaatataatcaatatactgaagaagaaaaaaataatattaattttaatattgatgatttatcttctaaattaaatgaatctattaataaagctatgattaatattaataaatttttaaatcaatgttctgtttcttatttaatgaattctatgattccttatggtgttaaacgtttagaagattttgatgcttctttaaaagatgctttattaaaatatatttatgataatcgtggtactttaattggtcaagttgatcgtttaaaagataaagttaataatactttatctactgatattccttttcaattatctaaatatgttgataatcaacgtttattatctacttttactgaatatattaaaaatattattaatacttctattttaaatttacgttatgaatctaatcatttaattgatttatctcgttatgcttctaaaattaatattggttctaaagttaattttgatcctattgataaaaatcaaattcaattatttaatttagaatcttctaaaattgaagttattttaaaaaatgctattgtttataattctatgtatgaaaatttttctacttctttttggattcgtattcctaaatattttaattctatttctttaaataatgaatatactattattaattgtatggaaaataattctggttggaaagtttctttaaattatggtgaaattatttggactttacaagatactcaagaaattaaacaacgtgttgtttttaaatattctcaaatgattaatatttctgattatattaatcgttggatttttgttactattactaataatcgtttaaataattctaaaatttatattaatggtcgtttaattgatcaaaaacctatttctaatttaggtaatattcatgcttctaataatattatgtttaaattagatggttgtcgtgatactcatcgttatatttggattaaatattttaatttatttgataaagaattaaatgaaaaagaaattaaagatttatatgataatcaatctaattctggtattttaaaagatttttggggtgattatttacaatatgataaaccttattatatgttaaatttatatgatcctaataaatatgttgatgttaataatgttggtattcgtggttatatgtatttaaaaggtcctcgtggttctgttatgactactaatatttatttaaattcttctttatatcgtggtactaaatttattattaaaaaatatgcttctggtaataaagataatattgttcgtaataatgatcgtgtttatattaatgttgttgttaaaaataaagaatatcgtttagctactaatgcttctcaagctggtgttgaaaaaattttatctgctttagaaattcctgatgttggtaatttatctcaagttgttgttatgaaatctaaaaatgatcaaggtattactaataaatgtaaaatgaatttacaagataataatggtaatgatattggttttattggttttcatcaatttaataatattgctaaattagttgcttctaattggtataatcgtcaaattgaacgttcttctcgtactttaggttgttcttgggaatttattcctgttgatgatggttggggtgaacgtcctttataa

SEQ ID NO: 42 - DNA, 3891 bp, Artificial Sequence
  BoNT/A,   S. pombe-modified 3
atgccatttgttaataaacaattcaattataaagaccctgtaaatggtgtggacattgcttatatcaaaattcctaacgcaggacaaatgcaacccgttaaagcttttaagatccataataagatttgggtcattcctgagagggacactttcaccaatcccgaggaaggtgacttgaatcctccacctgaagctaaacaagtgcctgtatcatattacgatagtacatatctatctactgacaatgaaaaagataactatcttaagggtgtcactaagctatttgaacgtatttactccaccgacttaggacgaatgttgcttacaagtattgttagaggaattccattttggggtggatctactattgacactgagttaaaagttattgatacaaattgtataaatgtgattcagcccgacggttcatatagatctgaagagttgaatcttgtaattataggcccttctgccgatataattcaatttgaatgtaagtcttttggtcatgaagttcttaatttaacacgtaatggatacggctcaactcaatacattcgtttttctcctgattttactttcggctttgaagagtctttagaggtggatacaaaccctttacttggagctggaaagttcgctacagatcctgccgttactttagcacatgagttaatccatgctggtcaccgcttatacggtattgcaataaatcctaatcgtgtttttaaagttaatacaaatgcctattacgaaatgtccggattagaagtatctttcgaggaattgcgaacttttggaggtcatgatgccaaattcattgattctctacaggaaaacgaatttcgtttatactattacaacaagtttaaagatattgcttccactttgaataaagctaaatccattgtaggaactacagcctcattacaatatatgaaaaacgttttcaaagaaaagtatcttttaagcgaggataccagcggtaaatttagcgtagataaacttaaattcgacaagttgtataagatgcttactgaaatctatactgaggacaacttcgtcaaattctttaaagtcttgaaccgtaagacctatttaaacttcgataaggctgtcttcaaaattaatattgttcccaaagttaattatactatatacgatggttttaacttaaggaacactaacttagctgcaaatttcaatggtcagaacacagaaataaataacatgaactttacaaagttaaaaaattttacaggtttgtttgaattttacaaacttttatgcgttcgaggtattatcacaagtaaaaccaagtctttagataaaggttataataaagctcttaatgatctttgcattaaggttaacaattgggacttgtttttctcacccagtgaagataacttcaccaatgatctaaacaaaggcgaagagataaccagtgacacaaatatagaagctgcagaagagaatatatccttagatcttatccaacagtattacttgactttcaactttgacaatgaaccagaaaacatttcaattgagaacttgtctagtgatattataggacaattagaacttatgcctaatattgaacgttttccaaatggcaagaaatacgagttagataaatatacaatgtttcactatttacgtgctcaagaatttgagcatggaaagtctcgtattgctttaactaattctgttaatgaagctttactaaatccatcaagagtttatacatttttcagttctgattatgtcaaaaaggtgaataaagctactgaagccgctatgtttttaggctgggttgagcaattggtctatgattttaccgatgaaactagtgaagtttccactaccgataagatagctgatatcactataatcataccatatattggtcccgctttaaatataggaaatatgctatacaaagatgactttgttggagcattaatttttagtggtgctgttattcttttagaatttatccctgaaattgcaatccctgttttaggaacctttgctcttgtttcatatattgctaataaggtacttactgttcagactatagacaatgcactttctaaacgtaacgaaaaatgggatgaagtttacaaatacatcgttacaaattggttagcaaaggtaaatactcaaattgatttaatcagaaaaaagatgaaagaagctcttgaaaatcaggcagaagcaactaaagccattataaactatcaatataatcaatataccgaggaagagaaaaacaatataaactttaatattgatgacttatcctctaaattaaatgaatcaatcaataaagccatgattaatataaataaatttcttaaccaatgcagtgtatcttatttgatgaactcaatgatcccttatggagtgaagcgattagaagactttgatgcttccttgaaggatgcattgttaaagtatatttacgataatcgaggaactttgatcggtcaagttgatcgcttaaaagataaggtcaacaatactttaagcactgatatcccttttcagttaagtaaatacgttgataatcagagacttttgtctacttttaccgaatatattaagaatattatcaatacttcgattttgaatttaagatatgaaagtaaccatcttatagatttatcgcgttacgcctcgaaaattaacattggatctaaagtcaattttgatcctattgataaaaaccaaattcagctattcaatcttgagtcttcaaagattgaggtaattttgaaaaatgctattgtttacaattcaatgtatgaaaatttttctacttcattttggattcgtattcccaagtactttaattcgatctctcttaacaatgaatataccattatcaactgtatggaaaataactctggctggaaagtatcattgaactatggagaaattatatggactcttcaagatactcaagaaattaaacaaagagtagtctttaaatattcacaaatgattaacatttccgattatattaatcgttggatttttgtgactatcacaaataaccgtctaaataactccaagatttatataaatggtcgcttaattgatcaaaaacctataagtaacttgggtaatattcatgcttccaataacataatgtttaagcttgatggttgtcgtgacactcacaggtatatctggattaaatattttaatctttttgataaagaattgaatgaaaaagaaattaaggatctttatgataatcaatctaattcgggcatcttgaaagatttttggggtgactacttgcaatatgataagccttattacatgttaaacttgtatgatcctaacaaatatgtagatgttaataacgtaggcattagaggttacatgtaccttaaaggtccaagaggtagtgttatgactacaaatatatatcttaactcatctttatacagaggcactaagttcatcattaagaaatatgctagcggtaacaaagataatatcgtccgcaacaatgaccgagtttacataaatgtggttgtgaaaaataaggaatatcgcttggccaccaatgcttctcaagcaggtgtcgaaaagattttgagcgctttagagatcccagatgttggtaacttgagccaagtcgttgtgatgaaaagcaagaatgatcaaggtattacaaataagtgtaaaatgaatctacaggacaataatggtaatgacattggattcattggttttcatcagtttaataatattgctaaactagttgcatcgaattggtataatcgtcaaattgagcgatcttcgcgtactttaggttgttcttgggagtttatacctgtagatgacggttggggcgagaggccattataa

SEQ ID NO: 43 - DNA, 3891 bp, Artificial Sequence
  BoNT/A,  Y. lipolytica-modified 1
atgcctttcgtgaataaacaattcaactacaaggatcctgtcaacggcgtcgacattgcttatattaagattcccaacgctggccagatgcagccggtgaaagctttcaagatccacaataagatttgggtgatcccagagcgggatacctttactaatcccgaggaaggagacctgaacccccctccggaggctaaacaggtccctgtctcctattacgactcaacctatctgtcgactgacaacgagaaagataattacctgaagggagtcaccaaactgttcgagcgcatctactcgaccgacttagggcgaatgctacttacttctattgtccgagggataccattttggggcggttcaacaattgacacagagctcaaagtcattgacacgaactgtattaacgttattcagcccgatgggtcttaccgaagcgaagagttgaacctggttatcattggtccctccgccgatattatccagttcgagtgtaagtcttttggtcatgaggtcctgaacttgacccgtaacggatacggttcgacccagtacatccgtttctccccagattttactttcggctttgaggaaagtctggaagttgatacgaaccctttgctcggagccggcaaattcgcaaccgaccctgctgtcaccctcgcacatgagctcattcacgctggccacaggctttacggaattgctattaaccctaaccgagttttcaaggtcaacacaaacgcctattacgaaatgtccggactggaagtgtcgtttgaagagctgcggacctttggaggtcatgatgctaagtttatcgatagcctgcaggagaacgaattccgactttactattacaacaaattcaaggacatcgcctcgactctgaacaaggccaaatccatcgtgggtaccacggctagtctgcagtatatgaagaacgtgttcaaggagaagtacctccttagtgaggacacttcgggaaagttctctgttgataaactgaagtttgacaagctgtacaagatgctcactgagatttacaccgaagacaatttcgtaaagtttttcaaggtgctcaaccgtaagacctacctcaactttgacaaagctgtgtttaaaattaatatcgtccccaaggtgaactacactatttacgacggtttcaatctccgaaacaccaatctcgcagcgaacttcaacggacagaacacagagatcaacaatatgaactttaccaagttgaagaacttcaccggtctatttgagttctacaagctgctctgcgtgcggggtattatcacctccaagactaagagcctcgacaagggctacaacaaggccttgaacgacttgtgtatcaaggtgaacaattgggacctgttcttttcaccctccgaggataacttcacgaacgacctgaataagggtgaagagattacatccgatacgaacatcgaagcagctgaggaaaatatctctctcgatctgattcagcaatactatcttaccttcaacttcgacaacgagcctgagaacatttctatcgagaacctgagttctgatattataggtcagctcgagctgatgcccaacatcgagagatttcccaacggcaagaaatacgagcttgacaagtacactatgtttcactacctgcgagcccaggagttcgagcacggcaagtcgcgaatcgcactaaccaactctgtgaatgaggctctgctcaatccgtctcgagtgtacactttcttttctagcgactacgtgaagaaagtgaataaggcgacagaagcagctatgtttctcgggtgggtggagcagctggtgtacgactttacggacgagacctcggaagtgtccaccactgacaagattgccgacatcacaatcattatcccttacattggccccgccctcaacatcggcaatatgctctacaaggatgacttcgtcggtgcgctaatcttctctggcgccgttatcctgcttgagttcattcccgagattgccatcccggtgctgggaacttttgctctagtcagttatatcgcaaacaaggtcctgactgttcagaccatcgacaacgccctctctaagcgcaacgagaagtgggatgaggtctacaagtatattgttaccaactggttggctaaggttaacactcaaattgacctcattcggaagaaaatgaaggaggccttggagaaccaggccgaggcaactaaggccattatcaattatcaatacaaccaatacacagaggaagagaagaacaatattaattttaacatcgacgatctgtcctctaagctcaacgagtccattaacaaggcgatgatcaacatcaataagtttctgaaccagtgctccgtgagctaccttatgaactcgatgattccctacggagttaagcgactggaggactttgatgcttccttaaaggacgctctgcttaagtacatctacgacaatcgtggcacactgatcggtcaggtggatcgactgaaggacaaggttaacaatacgctgtcgacggacatcccattccagctttcaaagtacgtcgacaaccagcgcttgctatcgacctttaccgagtacatcaagaatatcattaacacctctatccttaatctgagatacgaatccaaccatctcatcgacttgtcccgatacgcctccaagattaacattggttctaaggttaactttgatcccatcgacaagaaccagatacagctattcaatctggagagcagtaaaatcgaagtcatcttgaagaacgccatagtgtacaactctatgtatgagaacttctcaacgtcgttctggatacggatcccaaaatacttcaactctatttccctcaacaatgaatataccattatcaactgcatggagaacaatagcggatggaaggtgtcacttaactacggcgaaatcatttggaccctgcaggacacacaggagatcaagcaaagagtcgtgttcaagtacagccagatgattaacatttcggactatatcaaccgttggattttcgtcaccatcaccaacaatagactgaacaatagtaagatctacattaacggtagacttatcgatcaaaaacctatctctaacctgggaaatatccatgcttcaaacaatattatgtttaagctcgacggctgccgagacactcaccggtatatttggattaagtacttcaacctgttcgataaagaactgaacgagaaggagattaaagatctctacgacaaccagtctaactcgggtatcctgaaagatttctggggagactatctccaatatgataagccctactatatgctgaacctttacgatcctaacaaatacgtggacgtgaacaacgtcggaattcggggctacatgtaccttaagggacctaggggctccgtaatgacgactaacatctaccttaactccagcctctaccgaggtacaaagttcattatcaagaagtacgcctctggcaacaaggacaacattgtacgaaacaacgaccgagtatacatcaacgttgtcgttaagaacaaggagtaccgccttgcgactaacgcctctcaggcgggagtcgagaagattctctccgccctggaaattcccgacgtcggcaacctctcgcaggttgtggttatgaagtccaagaacgatcagggcattaccaacaagtgcaagatgaacctgcaagacaacaacggcaacgacatcggattcatcggatttcaccagtttaacaacatcgccaagttggttgcctcgaactggtacaaccgacagattgagcgatcttcaagaacattgggctgtagctgggaattcatccccgtggatgacggatggggagagagaccgttgtaa

SEQ ID NO: 44 - DNA, 3891 bp, Artificial Sequence
  BoNT/A,  Y. lipolytica-modified 2
atgcccttcgtgaacaagcagttcaactacaaggaccccgtgaacggcgtggacatcgcctacatcaagatccccaacgccggccagatgcagcccgtgaaggccttcaagatccacaacaagatctgggtgatccccgagcgagacaccttcaccaaccccgaggagggcgacctgaaccccccccccgaggccaagcaggtgcccgtgtcttactacgactctacctacctgtctaccgacaacgagaaggacaactacctgaagggcgtgaccaagctgttcgagcgaatctactctaccgacctgggccgaatgctgctgacctctatcgtgcgaggcatccccttctggggcggctctaccatcgacaccgagctgaaggtgatcgacaccaactgcatcaacgtgatccagcccgacggctcttaccgatctgaggagctgaacctggtgatcatcggcccctctgccgacatcatccagttcgagtgcaagtctttcggccacgaggtgctgaacctgacccgaaacggctacggctctacccagtacatccgattctctcccgacttcaccttcggcttcgaggagtctctggaggtggacaccaaccccctgctgggcgccggcaagttcgccaccgaccccgccgtgaccctggcccacgagctgatccacgccggccaccgactgtacggcatcgccatcaaccccaaccgagtgttcaaggtgaacaccaacgcctactacgagatgtctggcctggaggtgtctttcgaggagctgcgaaccttcggcggccacgacgccaagttcatcgactctctgcaggagaacgagttccgactgtactactacaacaagttcaaggacatcgcctctaccctgaacaaggccaagtctatcgtgggcaccaccgcctctctgcagtacatgaagaacgtgttcaaggagaagtacctgctgtctgaggacacctctggcaagttctctgtggacaagctgaagttcgacaagctgtacaagatgctgaccgagatctacaccgaggacaacttcgtgaagttcttcaaggtgctgaaccgaaagacctacctgaacttcgacaaggccgtgttcaagatcaacatcgtgcccaaggtgaactacaccatctacgacggcttcaacctgcgaaacaccaacctggccgccaacttcaacggccagaacaccgagatcaacaacatgaacttcaccaagctgaagaacttcaccggcctgttcgagttctacaagctgctgtgcgtgcgaggcatcatcacctctaagaccaagtctctggacaagggctacaacaaggccctgaacgacctgtgcatcaaggtgaacaactgggacctgttcttctctccctctgaggacaacttcaccaacgacctgaacaagggcgaggagatcacctctgacaccaacatcgaggccgccgaggagaacatctctctggacctgatccagcagtactacctgaccttcaacttcgacaacgagcccgagaacatctctatcgagaacctgtcttctgacatcatcggccagctggagctgatgcccaacatcgagcgattccccaacggcaagaagtacgagctggacaagtacaccatgttccactacctgcgagcccaggagttcgagcacggcaagtctcgaatcgccctgaccaactctgtgaacgaggccctgctgaacccctctcgagtgtacaccttcttctcttctgactacgtgaagaaggtgaacaaggccaccgaggccgccatgttcctgggctgggtggagcagctggtgtacgacttcaccgacgagacctctgaggtgtctaccaccgacaagatcgccgacatcaccatcatcatcccctacatcggccccgccctgaacatcggcaacatgctgtacaaggacgacttcgtgggcgccctgatcttctctggcgccgtgatcctgctggagttcatccccgagatcgccatccccgtgctgggcaccttcgccctggtgtcttacatcgccaacaaggtgctgaccgtgcagaccatcgacaacgccctgtctaagcgaaacgagaagtgggacgaggtgtacaagtacatcgtgaccaactggctggccaaggtgaacacccagatcgacctgatccgaaagaagatgaaggaggccctggagaaccaggccgaggccaccaaggccatcatcaactaccagtacaaccagtacaccgaggaggagaagaacaacatcaacttcaacatcgacgacctgtcttctaagctgaacgagtctatcaacaaggccatgatcaacatcaacaagttcctgaaccagtgctctgtgtcttacctgatgaactctatgatcccctacggcgtgaagcgactggaggacttcgacgcctctctgaaggacgccctgctgaagtacatctacgacaaccgaggcaccctgatcggccaggtggaccgactgaaggacaaggtgaacaacaccctgtctaccgacatccccttccagctgtctaagtacgtggacaaccagcgactgctgtctaccttcaccgagtacatcaagaacatcatcaacacctctatcctgaacctgcgatacgagtctaaccacctgatcgacctgtctcgatacgcctctaagatcaacatcggctctaaggtgaacttcgaccccatcgacaagaaccagatccagctgttcaacctggagtcttctaagatcgaggtgatcctgaagaacgccatcgtgtacaactctatgtacgagaacttctctacctctttctggatccgaatccccaagtacttcaactctatctctctgaacaacgagtacaccatcatcaactgcatggagaacaactctggctggaaggtgtctctgaactacggcgagatcatctggaccctgcaggacacccaggagatcaagcagcgagtggtgttcaagtactctcagatgatcaacatctctgactacatcaaccgatggatcttcgtgaccatcaccaacaaccgactgaacaactctaagatctacatcaacggccgactgatcgaccagaagcccatctctaacctgggcaacatccacgcctctaacaacatcatgttcaagctggacggctgccgagacacccaccgatacatctggatcaagtacttcaacctgttcgacaaggagctgaacgagaaggagatcaaggacctgtacgacaaccagtctaactctggcatcctgaaggacttctggggcgactacctgcagtacgacaagccctactacatgctgaacctgtacgaccccaacaagtacgtggacgtgaacaacgtgggcatccgaggctacatgtacctgaagggcccccgaggctctgtgatgaccaccaacatctacctgaactcttctctgtaccgaggcaccaagttcatcatcaagaagtacgcctctggcaacaaggacaacatcgtgcgaaacaacgaccgagtgtacatcaacgtggtggtgaagaacaaggagtaccgactggccaccaacgcctctcaggccggcgtggagaagatcctgtctgccctggagatccccgacgtgggcaacctgtctcaggtggtggtgatgaagtctaagaacgaccagggcatcaccaacaagtgcaagatgaacctgcaggacaacaacggcaacgacatcggcttcatcggcttccaccagttcaacaacatcgccaagctggtggcctctaactggtacaaccgacagatcgagcgatcttctcgaaccctgggctgctcttgggagttcatccccgtggacgacggctggggcgagcgacccctgtaa

SEQ ID NO: 45 - DNA, 3891 bp, Artificial Sequence
  BoNT/A,  Y. lipolytica-modified 3
atgcccttcgtcaacaagcagtttaactacaaggaccccgtgaacggcgttgatatcgcttacatcaagattcccaacgctggccagatgcagcccgttaaggcctttaagatccacaacaagatctgggttatccccgaacgggatacctttacaaaccctgaggaaggagacctgaaccctcccccagaggctaagcaggtgccggtgtcctactacgattctacctacctgtctaccgataacgagaaggacaactacctgaagggcgttaccaagctcttcgaacgaatttactcgacggatctgggccggatgctgcttaccagcattgtgcgaggcattcctttttggggtggaagcaccatcgacactgagctgaaggtgattgacacaaactgcatcaacgttatccagcccgacggctcttaccgatctgaagagcttaacctcgtcatcattggaccttcggctgatatcattcagttcgagtgcaagtccttcggccacgaagtgcttaacctgacacgaaacggttacggttccactcagtacattagattttcaccggactttaccttcggatttgaggaatcgctcgaggtggataccaaccctctccttggagccggaaagttcgcaacagaccctgccgtcactctggctcatgagctgatccacgctggtcacagactttacggcattgccattaaccccaaccgagtctttaaggtgaacaccaacgcttactacgagatgtcaggattggaggtttcgttcgaggaactccgaacctttggtggacacgacgctaagttcattgacagcctgcaggagaacgaatttcggctttactactacaacaagtttaaggacatcgcctccacactgaacaaggcaaagtccatcgtgggtaccacagcctccctgcagtacatgaagaacgtgttcaaggagaagtacttgctgtcggaagacacatccggcaagttttctgtggacaagctgaagttcgacaagctctacaagatgctgaccgagatttacactgaggacaacttcgtgaagttctttaaggtgctcaaccgtaagacttaccttaacttcgacaaggccgtgttcaagatcaacatcgtccccaaggtgaactacactatctacgacggatttaacctgcgtaacacgaacctcgccgctaacttcaacggacagaacaccgagattaacaacatgaacttcaccaagctgaagaactttactggtctgttcgagttttacaagttgctttgtgttcggggtatcattacgtcgaagacgaagtccctggacaagggttacaacaaggccctcaacgacctctgcatcaaggtcaacaactgggacctctttttctctccatccgaggacaacttcactaacgacctcaacaagggcgaagagatcacttcggacaccaacatcgaggccgctgaagagaacatctctctggatcttattcagcagtactacttgacctttaactttgataacgagccggagaacatttccatcgaaaacttgagctccgatattatcggccagctggaactgatgccaaacattgagcgattccctaacggcaagaagtacgagctcgacaagtacactatgtttcactaccttagagctcaggagtttgagcacggcaagtctcgaatcgctctcactaactctgtgaacgaggccctgctcaacccctctcgagtctacactttcttttcatctgactacgtcaagaaggtcaacaaggcaacagaggcagccatgttcctgggctgggtcgagcagctcgtgtacgatttcacggatgaaacgagcgaggtttctacgaccgacaagattgctgacattactatcattatcccctacattggtcccgccctgaacattggcaacatgttgtacaaggatgactttgtcggcgccttgattttttctggtgccgtcatccttctcgaatttatcccggaaattgctatccctgttcttggcacctttgccctggtgtcttacatcgccaacaaggttctcaccgtgcagaccatcgataacgccctgtctaagcgcaacgagaagtgggatgaggtgtacaagtacattgtgaccaactggctggcaaaggtgaacacacagatcgacctcattcgtaagaagatgaaggaggccttggagaaccaggctgaggcaaccaaggctattatcaactaccagtacaaccagtacaccgaagaggaaaagaacaacattaactttaacatcgacgatctgtctagcaagttgaacgagtccatcaacaaggctatgatcaacattaacaagttcctgaaccagtgcagcgtttcatacctcatgaactccatgattccatacggagtgaagcgactggaggatttcgatgccagcctgaaggacgcactgctcaagtacatctacgataaccggggcacgctgatcggccaggtcgatcgcctgaaggacaaggtcaacaacacgctctccaccgacattcctttccagctgtctaagtacgtcgataaccagcgactgctttcaactttcaccgagtacatcaagaacatcattaacacttctatcctgaacctccgatacgagtctaaccatctgatcgatctttcccgatacgcctctaagattaacatcggttcgaaggtgaactttgaccctattgacaagaaccagatccagctgttcaacctcgagtccagcaagatcgaggttattctcaagaacgctattgtctacaactctatgtacgagaacttctcgacatccttctggattagaattcccaagtacttcaactcgatctcgctgaacaacgaatacaccattatcaactgtatggagaacaactcaggttggaaggtctcacttaactacggcgagattatctggactctgcaggacacccaggagattaagcagagagtcgtgtttaagtactctcagatgattaacatttcggattacatcaaccggtggattttcgtcactatcaccaacaaccgtctgaacaactcgaagatttacattaacggccgacttatcgaccagaagccaatttctaacctgggcaacatccatgcctccaacaacatcatgttcaagctcgacggatgccgagatactcatcgatacatctggatcaagtacttcaacctgttcgacaaggagctcaacgagaaggagattaaggatctgtacgacaaccagtctaactcgggaatcctgaaggacttctggggagattacctgcagtacgacaagccctactacatgctcaacctttacgacccgaacaagtacgttgacgtgaacaacgtgggcatccgcggttacatgtacctgaagggtccccggggatctgtcatgacaaccaacatctacttgaactcgtcattgtaccgaggaactaagttcattatcaagaagtacgcaagcggcaacaaggataacattgtgagaaacaacgacagagtttacatcaacgttgtggttaagaacaaggagtaccgtctggccacaaacgcctctcaggccggagtcgaaaagatcctctctgccctggagattcccgacgtcggaaacttgtcccaggtggtcgtgatgaagtccaagaacgatcagggaattaccaacaagtgtaagatgaacttgcaggacaacaacggaaacgacatcggcttcattggcttccatcagttcaacaacattgccaagttggtggcctctaactggtacaaccgccagatcgaacgatcgtcccgaacgctgggatgttcttgggaattcatccctgttgacgacggttggggtgagcgacctctgtaa

SEQ ID NO: 46 - DNA, 3891 bp, Artificial Sequence
  BoNT/A,  D. discoideum-modified 1
atgccatttgtgaataaacaatttaattataaagatccagttaatggtgttgacatagcttatataaagattccaaatgctggtcaaatgcaaccagttaaagcattcaagatccataataaaatatgggtaattccagagagagatacatttacaaacccagaagagggtgatttaaatccaccgccagaagcaaaacaagtacccgtttcatattacgattcaacatatttatctacagataatgaaaaagataactatcttaaaggagttacaaaactcttcgaaagaatttatagtactgatcttggtcgtatgttacttacttcaattgtccgtggtattccattttggggtggcagtaccattgataccgagttaaaagtaatcgatactaattgtattaatgttatacaaccagatggttcatatagatcagaagagttaaatcttgttatcattggtccttcagcagatataattcaatttgaatgtaaatcttttggtcacgaggtattaaacttaacacgtaatggttatggttctacacaatatatcagattttcaccagatttcacattcggttttgaagagtcgttagaagtagatacaaatccattactgggagcaggtaaattcgcaactgatcctgcagtaacattagctcatgaattaattcatgcaggtcacagattatatggtatagccattaatcctaatagagtttttaaagttaataccaatgcatattacgaaatgtcaggtttagaagtctcatttgaagagttaagaacattcgggggacatgatgctaaatttatagattcattacaagaaaatgaatttagattatattactataataagtttaaagatattgccagtaccttaaataaagcaaaatcaattgtcggaacaactgcctcattacaatatatgaaaaatgttttcaaagaaaaatatctactttcagaagataccagtggaaagttttcagtagataaattaaaattcgataagttatataaaatgttgacagaaatttatactgaagataattttgttaagtttttcaaagtgctaaatagaaagacatatttaaatttcgataaagccgtttttaaaattaatattgttccaaaagtcaattatactatttatgatggatttaatttaagaaatacaaatcttgctgcaaattttaatggtcaaaatactgaaattaataacatgaattttacaaaacttaaaaattttactggtttattcgaattttacaaattactatgtgtaagaggtattataacttctaaaactaaaagcctcgataaaggttataataaagctttaaacgatctttgtattaaagttaataactgggatttattcttttcaccatccgaagacaattttacaaatgatttgaataagggtgaagagataacatcagatacgaatatcgaagcagctgaagagaatatatcattagatttaattcaacagtattacttaacttttaattttgacaatgaaccagaaaatatctcaatagaaaatttgtcatccgacattatcggtcaattagaattaatgcctaatattgaacgtttccctaatggaaaaaagtatgaattagataaatataccatgtttcattatttaagagctcaagaatttgaacatggtaagtcacgtattgcattaacaaattcagttaatgaagcattgttaaatccatcaagagtttatacattcttttccagtgattatgttaagaaagttaacaaagcaacagaagccgctatgtttctaggatgggttgaacaattagtatatgattttacagatgaaacatctgaagtatcaactacagataaaattgctgatattactattatcattccatatattggtccagcacttaatattggtaatatgttatataaagatgactttgttggtgcattaatattctcaggtgctgttattttacttgaatttataccagaaattgcgattccagtattaggtacttttgcattagtttcatacatagctaataaagttttgaccgttcaaacaattgataatgcactctcaaagagaaatgaaaaatgggatgaagtttataaatatatagtaacaaattggttagcaaaagttaatactcaaattgatttaattagaaaaaagatgaaagaagcattagaaaatcaagcagaagcaacaaaagctataattaattatcaatataatcaatataccgaagaggaaaaaaataacattaacttcaatattgatgacttaagttcaaaattaaatgaaagtataaataaagctatgattaatatcaataaatttttaaatcaatgttcagtatcatatttaatgaatagtatgattccatatggtgttaaaagattggaggattttgatgctagtttaaaagatgctttattgaaatacatttatgataataggggtactttaatcggtcaagttgatcgtttaaaggataaagttaataacactttatctacagatataccattccaactatcaaaatatgttgataatcaacgtttattgtcaacttttactgaatatattaaaaatattataaatacctccattcttaatttacgttatgaaagtaatcatttaatcgatttgagtagatatgcatcgaaaataaatatcggttcaaaagtaaatttcgatccaatagacaaaaatcaaattcaacttttcaatttagaatcatctaagattgaagtaatcctcaaaaatgctattgtttataatagtatgtatgaaaatttttcaacctctttttggattcgaattccaaaatactttaactcaatatcattaaataacgaatatactattatcaattgtatggaaaataacagcggttggaaagtaagtttaaattatggtgaaattatatggacattgcaagatactcaagaaatcaaacaaagagtagtctttaaatatagtcaaatgataaatatttcagattacattaatagatggatctttgttactattactaataacagattgaataatagtaagatttatattaatggaagattaattgatcaaaaaccaatttcaaatttaggtaatattcatgcatctaataatataatgtttaaattagatggttgtagagatacacatcgttatatttggattaaatatttcaatttgtttgataaagaattaaatgaaaaagaaatcaaagatttatatgataatcaatctaattctggtatacttaaagatttttggggtgattatttacaatatgataaaccatactatatgttgaatttatatgatccaaataagtacgttgatgtgaataatgtaggtataagaggatatatgtatttgaaaggaccaagaggttcagttatgactacaaatatttatttaaattcatctctatatcgtggtacaaaatttattataaaaaaatatgcaagtggtaataaagataatattgtgagaaataatgatagagtttatattaatgtagttgtaaaaaataaagaatacagactcgctacaaatgcttcacaagcaggtgtcgaaaaaattttatcagcattagagattccagatgttggaaatttaagtcaagttgtagttatgaaatctaaaaatgatcaaggtattacaaataaatgcaaaatgaatttacaagataataatggtaatgatattggtttcattggttttcatcaattcaataatattgcaaaattagttgccagtaattggtataataggcaaattgaaagaagttctcgtactttaggttgttcatgggaatttattccagtagatgatggctggggcgaaagaccattgtaa

SEQ ID NO: 47 - DNA, 3891 bp, Artificial Sequence
  BoNT/A,  D. discoideum-modified 2
atgccatttgttaataaacaatttaattataaagatccagttaatggtgttgatattgcatatattaaaattccaaatgcaggtcaaatgcaaccagttaaagcatttaaaattcataataaaatttgggttattccagaaagagatacatttacaaatccagaagaaggtgatttaaatccaccaccagaagcaaaacaagttccagtttcatattatgattcaacatatttatcaacagataatgaaaaagataattatttaaaaggtgttacaaaattatttgaaagaatttattcaacagatttaggtagaatgttattaacatcaattgttagaggtattccattttggggtggttcaacaattgatacagaattaaaagttattgatacaaattgtattaatgttattcaaccagatggttcatatagatcagaagaattaaatttagttattattggtccatcagcagatattattcaatttgaatgtaaatcatttggtcatgaagttttaaatttaacaagaaatggttatggttcaacacaatatattagattttcaccagattttacatttggttttgaagaatcattagaagttgatacaaatccattattaggtgcaggtaaatttgcaacagatccagcagttacattagcacatgaattaattcatgcaggtcatagattatatggtattgcaattaatccaaatagagtttttaaagttaatacaaatgcatattatgaaatgtcaggtttagaagtttcatttgaagaattaagaacatttggtggtcatgatgcaaaatttattgattcattacaagaaaatgaatttagattatattattataataaatttaaagatattgcatcaacattaaataaagcaaaatcaattgttggtacaacagcatcattacaatatatgaaaaatgtttttaaagaaaaatatttattatcagaagatacatcaggtaaattttcagttgataaattaaaatttgataaattatataaaatgttaacagaaatttatacagaagataattttgttaaattttttaaagttttaaatagaaaaacatatttaaattttgataaagcagtttttaaaattaatattgttccaaaagttaattatacaatttatgatggttttaatttaagaaatacaaatttagcagcaaattttaatggtcaaaatacagaaattaataatatgaattttacaaaattaaaaaattttacaggtttatttgaattttataaattattatgtgttagaggtattattacatcaaaaacaaaatcattagataaaggttataataaagcattaaatgatttatgtattaaagttaataattgggatttatttttttcaccatcagaagataattttacaaatgatttaaataaaggtgaagaaattacatcagatacaaatattgaagcagcagaagaaaatatttcattagatttaattcaacaatattatttaacatttaattttgataatgaaccagaaaatatttcaattgaaaatttatcatcagatattattggtcaattagaattaatgccaaatattgaaagatttccaaatggtaaaaaatatgaattagataaatatacaatgtttcattatttaagagcacaagaatttgaacatggtaaatcaagaattgcattaacaaattcagttaatgaagcattattaaatccatcaagagtttatacatttttttcatcagattatgttaaaaaagttaataaagcaacagaagcagcaatgtttttaggttgggttgaacaattagtttatgattttacagatgaaacatcagaagtttcaacaacagataaaattgcagatattacaattattattccatatattggtccagcattaaatattggtaatatgttatataaagatgattttgttggtgcattaattttttcaggtgcagttattttattagaatttattccagaaattgcaattccagttttaggtacatttgcattagtttcatatattgcaaataaagttttaacagttcaaacaattgataatgcattatcaaaaagaaatgaaaaatgggatgaagtttataaatatattgttacaaattggttagcaaaagttaatacacaaattgatttaattagaaaaaaaatgaaagaagcattagaaaatcaagcagaagcaacaaaagcaattattaattatcaatataatcaatatacagaagaagaaaaaaataatattaattttaatattgatgatttatcatcaaaattaaatgaatcaattaataaagcaatgattaatattaataaatttttaaatcaatgttcagtttcatatttaatgaattcaatgattccatatggtgttaaaagattagaagattttgatgcatcattaaaagatgcattattaaaatatatttatgataatagaggtacattaattggtcaagttgatagattaaaagataaagttaataatacattatcaacagatattccatttcaattatcaaaatatgttgataatcaaagattattatcaacatttacagaatatattaaaaatattattaatacatcaattttaaatttaagatatgaatcaaatcatttaattgatttatcaagatatgcatcaaaaattaatattggttcaaaagttaattttgatccaattgataaaaatcaaattcaattatttaatttagaatcatcaaaaattgaagttattttaaaaaatgcaattgtttataattcaatgtatgaaaatttttcaacatcattttggattagaattccaaaatattttaattcaatttcattaaataatgaatatacaattattaattgtatggaaaataattcaggttggaaagtttcattaaattatggtgaaattatttggacattacaagatacacaagaaattaaacaaagagttgtttttaaatattcacaaatgattaatatttcagattatattaatagatggatttttgttacaattacaaataatagattaaataattcaaaaatttatattaatggtagattaattgatcaaaaaccaatttcaaatttaggtaatattcatgcatcaaataatattatgtttaaattagatggttgtagagatacacatagatatatttggattaaatattttaatttatttgataaagaattaaatgaaaaagaaattaaagatttatatgataatcaatcaaattcaggtattttaaaagatttttggggtgattatttacaatatgataaaccatattatatgttaaatttatatgatccaaataaatatgttgatgttaataatgttggtattagaggttatatgtatttaaaaggtccaagaggttcagttatgacaacaaatatttatttaaattcatcattatatagaggtacaaaatttattattaaaaaatatgcatcaggtaataaagataatattgttagaaataatgatagagtttatattaatgttgttgttaaaaataaagaatatagattagcaacaaatgcatcacaagcaggtgttgaaaaaattttatcagcattagaaattccagatgttggtaatttatcacaagttgttgttatgaaatcaaaaaatgatcaaggtattacaaataaatgtaaaatgaatttacaagataataatggtaatgatattggttttattggttttcatcaatttaataatattgcaaaattagttgcatcaaattggtataatagacaaattgaaagatcatcaagaacattaggttgttcatgggaatttattccagttgatgatggttggggtgaaagaccattataa

SEQ ID NO: 48 - DNA, 3891 bp, Artificial Sequence
  BoNT/A,  D. discoideum-modified 3
atgccatttgttaataaacaattcaattataaagatccagtaaatggtgtagatattgcatatataaaaattccaaatgctggacaaatgcaacctgttaaagcattcaaaattcataataaaatatgggttattccagaacgtgatacctttaccaatccagaagaaggtgatttaaatccacctccagaagcaaaacaagttccagtatcatattatgatagtacatatcttagtactgataatgaaaaagataattatttaaaaggtgtaacaaaattgtttgaacgtatttattcaaccgatttaggtagaatgttattgacatcaatagtaagaggtattccattttggggtggatcaacaattgatacagaattgaaagttattgatactaattgtataaatgttattcaacctgatggttcttatagatcagaagaattaaatttagtaattataggaccatctgcagatattatacaatttgaatgtaaatcatttggtcatgaagttttaaatttaactagaaatggttatggttcaacacaatatattagattctcaccagattttacttttggatttgaagaatcacttgaagttgatacaaatccattattgggtgcaggaaaatttgctacagatccagctgtaactttggctcatgaattaattcatgcaggtcatagactttatggtattgcaattaatccaaatagagtatttaaagttaatacaaatgcatattatgaaatgtctggtttagaagtaagttttgaagaattacgtactttcggtggacatgatgcaaaatttatagattcacttcaagaaaatgaatttagattatattattataataaatttaaagatattgcatcaactttaaataaagcaaaatctattgttggtactacagcttctttacaatatatgaaaaatgttttcaaagaaaaatatttactttcagaagatacatctggtaaattctcagttgataaattaaaatttgataaattatataaaatgttgacagaaatttatactgaagataatttcgttaaatttttcaaagttttaaatagaaaaacctatcttaattttgataaagctgtattcaaaattaatatagttccaaaagttaattatacaatttatgatggttttaatttaagaaatactaatttagcagctaattttaatggacaaaatactgaaattaataatatgaattttacaaaattaaaaaattttacaggtctttttgaattctataaattattgtgtgttagaggtataattactagtaaaactaaatcattagataaaggttataataaagcattaaatgatttgtgtataaaagttaataattgggatttattcttttcaccatcagaagataattttacaaatgatttaaataaaggtgaagaaattacttctgatactaatattgaagctgcagaagaaaatattagtttagatttaatacaacaatattatcttacatttaatttcgataatgaaccagaaaatattagtattgaaaatttatcaagtgatattataggtcaattggaattaatgcctaatattgaaagattcccaaatggtaaaaaatatgaattagataaatataccatgtttcattatttaagagcacaagaattcgaacatggtaaatcaagaattgctttaaccaatagtgttaatgaagctttacttaatccatcaagagtttatacttttttctcatctgattatgtaaaaaaagttaataaagcaacagaagcagctatgttcttgggttgggttgaacaattggtttatgattttaccgatgaaacttcagaagttagtacaactgataaaattgctgatattactataattataccatatattggtccagcattaaatattggtaatatgttatataaagatgattttgtaggtgcattaattttttctggtgcagtaattttattggaatttataccagaaattgcaattccagttttaggtacattcgcattggtttcatatattgctaataaagttttaacagtacaaactattgataatgcattaagtaaaagaaatgaaaaatgggatgaagtttataaatatattgttactaattggttagcaaaagttaatactcaaattgatttaattcgtaaaaaaatgaaagaagctttagaaaatcaagcagaagctacaaaagcaataattaattatcaatataatcaatatactgaagaagaaaaaaataatattaatttcaatattgatgatttatcatctaaattaaatgaaagtataaataaagcaatgattaatattaataaatttttaaatcaatgttcagtttcatatttaatgaatagtatgattccatatggtgttaaaagattagaagattttgatgcatcattaaaagatgctttacttaaatatatttatgataatcgtggaacattaattggtcaagttgatagattaaaagataaagttaataatacattatctacagatattccttttcaattatcaaaatatgttgataatcaaagattattgagtacctttacagaatatattaaaaatattataaatactagtattttaaatttacgttatgaatctaatcatttaattgatttgtcacgttatgcatcaaaaattaatattggtagtaaagttaattttgatccaattgataaaaatcaaatacaattatttaatttagaatcaagtaaaattgaagtaatattaaaaaatgctattgtttataattcaatgtatgaaaatttcagtacttcattttggattagaattccaaaatattttaattctatttctttaaataatgaatatacaattataaattgtatggaaaataatagtggttggaaagtatcacttaattatggagaaattatatggacacttcaagatacacaagaaattaaacaaagagtagtttttaaatattcacaaatgattaatatttcagattatattaatagatggatatttgttacaataacaaataatagattaaataattcaaaaatatatattaatggtagattaattgatcaaaaaccaatttcaaatttaggaaatatacatgcatcaaataatattatgtttaaattagatggttgtcgtgatactcatagatatatttggattaaatatttcaatttatttgataaagaattaaatgaaaaagaaattaaagatttatatgataatcaatcaaattcaggtattttaaaagatttttggggtgattatttacaatatgataaaccatattatatgttaaatttatatgatccaaataaatatgttgatgttaataatgttggtattcgtggttatatgtatttaaaaggtccaagaggttcagtaatgacaaccaatatttatttaaattcaagtttatatagaggtacaaaatttattataaaaaaatatgcttcaggaaataaagataatatagttagaaataatgatcgtgtttatattaatgttgtagttaaaaataaagaatatagattagctaccaatgcatcacaagcaggagttgaaaaaattttatcagcattagaaattccagatgtaggtaatctttcacaagttgtagttatgaaatcaaaaaatgatcaaggtattacaaataaatgtaaaatgaatttacaagataataatggtaatgatattggtttcattggttttcatcaatttaataatattgcaaaattagtagcatcaaattggtataatagacaaattgaaagatcatcacgtacattaggttgttcatgggaattcattccagttgatgatggttggggtgaaagaccattataa

SEQ ID NO: 49 - DNA, 3891 bp, Artificial Sequence
  BoNT/A,  A. thaliana-modified 1
atgccttttgtgaacaaacagttcaattacaaagatccagttaacggtgtcgacattgcttacattaaaattcctaacgctggtcagatgcagcctgtcaaagcatttaaaatccataataaaatatgggtgatacccgaaagagataccttcacgaacccagaggaaggtgacctcaacccacctccggaggctaaacaagtaccggtctcttattacgactcgacgtatctgtccacagacaatgaaaaagacaattacctgaagggtgtaactaaattgtttgagagaatttatagcactgatttgggtagaatgctccttactagcatcgtgagaggtattcctttttggggaggttccaccatagatactgaactgaaggtaatagacacaaattgcataaatgtaatacagccggatggttcgtatcgctctgaagagctgaacctggtcattataggtccttcagccgatattatacagttcgagtgtaagtcgtttggacatgaggttctgaatttaactcgtaatggttatggttcgacccagtatattaggttcagtccggattttacatttgggttcgaagagtcactcgaggtggatactaaccctctgttaggagccggaaagttcgcaacagatccagctgtcacgctcgctcacgaacttattcacgctgggcatagactgtatggaattgctatcaatccaaatagggttttcaaagtgaataccaatgcatattacgagatgtcgggcctggaagtgtcttttgaggaacttcgaacttttgggggacacgatgcgaagttcattgatagccttcaagaaaatgaatttaggctgtactattacaataaatttaaggatatagctagcactttgaacaaagcaaagtctatcgttggtacgactgctagcctgcaatacatgaaaaatgtattcaaggaaaaatacttgcttagcgaggatacaagtggtaagttcagtgttgataagttgaaatttgataaactgtataaaatgttgactgaaatatatactgaagataattttgtcaaatttttcaaagttttaaacaggaaaacgtatttgaacttcgataaagctgtttttaagattaacattgtaccaaaggtgaactataccatatatgatgggtttaatttgcggaacaccaacttagcggcaaacttcaatgggcagaacaccgaaatcaacaatatgaattttacaaaattgaagaatttcacgggactgttcgagttttacaagcttctctgcgttcgtggcattatcacatccaagacaaagtctttggataagggatataataaagctctgaacgatctctgcatcaaggtcaacaattgggatctcttcttttcaccatcggaagataactttactaacgatttgaacaagggtgaagagattacctcagatacgaatatcgaggcggcagaagagaacatcagcttggatttaattcaacagtattaccttacatttaacttcgacaatgagccagagaatatttctatagaaaacttgtcatctgatatcattggtcaactggagctgatgcccaacatcgaacgatttccaaacggcaagaaatacgaactggataaatacacaatgttccattacctgcgagcccaagagtttgaacacggtaagagtagaatagctttgacaaatagcgtaaatgaggcgctgttgaatccttctagagtctatacttttttcagttcggactacgttaagaaagttaataaagctactgaggcggcaatgtttcttggttgggttgaacagctggtgtatgatttcacagatgagacatcggaggttagcactacagacaaaatagcagatattacaatcattatcccttatattggaccagccctgaatatcggaaacatgctttataaggatgacttcgtcggtgctctgatcttttccggcgctgtcattttgcttgagtttattcctgaaattgctattccagtgcttggtactttcgcattggtgtcatatatcgccaacaaggttttaacagtacagactatcgacaacgctttgtcaaagcgaaacgaaaagtgggacgaagtttacaagtatattgtgacgaattggttagccaaggttaacactcaaattgaccttattaggaagaaaatgaaagaagcccttgagaaccaggccgaagctacaaaggcgataatcaattatcaatacaaccagtacaccgaggaagagaaaaataacattaactttaacattgacgatctgtctagcaagttgaacgagtccattaataaggctatgattaacataaacaaattcttgaatcaatgttcagtcagttacctgatgaatagtatgattccttacggggtaaaacgtctggaagactttgacgcatcgcttaaggatgcacttctgaaatacatctacgataacagaggaactctgatcggacaagttgatcggctgaaagataaggttaacaataccttatctaccgatatacctttccaattgagcaagtatgtggacaaccagaggctgttgagtacatttacggaatacattaagaacattatcaatactagtatattgaatttaaggtacgaaagcaatcatctcatcgatctttctcggtacgcttctaaaatcaatattggatcaaaagttaattttgatcccatcgacaagaatcaaattcaactctttaacttggaatccagtaagatcgaagttattttaaaaaatgccatagtgtataacagtatgtacgaaaatttctctacctcattctggatcagaatcccgaagtattttaattcaatctcgctgaacaatgagtatacaataattaattgtatggagaataactccggatggaaggtttcactcaattatggtgagataatttggacactgcaagatactcaagagatcaagcaaagagtagtcttcaaatattcgcaaatgatcaatatctccgactacattaataggtggatcttcgttacaatcacgaataacagattgaataacagtaaaatctatatcaatggccgtttaatagaccagaagcctatcagtaatctggggaatattcatgcttccaacaatattatgttcaagcttgatggctgtagagatacccatagatatatttggatcaaatacttcaacctgtttgacaaagagctgaacgagaaggaaataaaagacctgtatgataaccagtccaactctggaattctcaaggacttctggggagattacttgcagtatgataaaccatactatatgctgaacctgtatgatccgaataagtacgtggatgtcaacaatgttggtatccgtggctacatgtatctgaagggaccccgtgggtctgttatgacaactaatatatacctgaattcgtctttatacagaggaacgaagtttattataaaaaagtacgctagtggaaacaaagataacatagttcgaaataacgatcgggtttatatcaacgtggttgtcaaaaacaaagagtatagattagcaactaacgcttctcaagcaggggttgaaaagatattgagtgcgttagaaattccggatgtaggtaacttgtcccaagttgtggttatgaagtccaaaaacgatcaaggaataaccaataagtgcaaaatgaatttacaagataataacggaaatgacatcggctttattggattccaccaattcaataacatcgcaaagcttgtggctagtaattggtacaatcgccagatcgagaggtcgtcccgcactttggggtgtagctgggaattcattccagtggacgatggctggggagagcgtcctttataa

SEQ ID NO: 50 - DNA, 3891 bp, Artificial Sequence
  BoNT/A,  A. thaliana-modified 2
atgccttttgttaataagcaatttaattataaggatcctgttaatggagttgatattgcttatattaagattcctaatgctggacaaatgcaacctgttaaggcttttaagattcataataagatttgggttattcctgaaagagatacttttactaatcctgaagaaggagatctgaatcctcctcctgaagctaagcaagttcctgtttcttattatgattctacttatctgtctactgataatgaaaaggataattatctgaagggagttactaagctgtttgaaagaatttattctactgatctgggaagaatgctgctgacttctattgttagaggaattcctttttggggaggatctactattgatactgaactgaaggttattgatactaattgtattaatgttattcaacctgatggatcttatagatctgaagaactgaatctggttattattggaccttctgctgatattattcaatttgaatgtaagtcttttggacatgaagttctgaatctgactagaaatggatatggatctactcaatatattagattttctcctgattttacttttggatttgaagaatctctggaagttgatactaatcctctgctgggagctggaaagtttgctactgatcctgctgttactctggctcatgaactgattcatgctggacatagactgtatggaattgctattaatcctaatagagtttttaaggttaatactaatgcttattatgaaatgtctggactggaagtttcttttgaagaactgagaacttttggaggacatgatgctaagtttattgattctctgcaagaaaatgaatttagactgtattattataataagtttaaggatattgcttctactctgaataaggctaagtctattgttggaactactgcttctctgcaatatatgaagaatgtttttaaggaaaagtatctgctgtctgaagatacttctggaaagttttctgttgataagctgaagtttgataagctgtataagatgctgactgaaatttatactgaagataattttgttaagttttttaaggttctgaatagaaagacttatctgaattttgataaggctgtttttaagattaatattgttcctaaggttaattatactatttatgatggatttaatctgagaaatactaatctggctgctaattttaatggacaaaatactgaaattaataatatgaattttactaagctgaagaattttactggactgtttgaattttataagctgctgtgtgttagaggaattattacttctaagactaagtctctggataagggatataataaggctctgaatgatctgtgtattaaggttaataattgggatctgtttttttctccttctgaagataattttactaatgatctgaataagggagaagaaattacttctgatactaatattgaagctgctgaagaaaatatttctctggatctgattcaacaatattatctgacttttaattttgataatgaacctgaaaatatttctattgaaaatctgtcttctgatattattggacaactggaactgatgcctaatattgaaagatttcctaatggaaagaagtatgaactggataagtatactatgtttcattatctgagagctcaagaatttgaacatggaaagtctagaattgctctgactaattctgttaatgaagctctgctgaatccttctagagtttatacttttttttcttctgattatgttaagaaggttaataaggctactgaagctgctatgtttctgggatgggttgaacaactggtttatgattttactgatgaaacttctgaagtttctactactgataagattgctgatattactattattattccttatattggacctgctctgaatattggaaatatgctgtataaggatgattttgttggagctctgattttttctggagctgttattctgctggaatttattcctgaaattgctattcctgttctgggaacttttgctctggtttcttatattgctaataaggttctgactgttcaaactattgataatgctctgtctaagagaaatgaaaagtgggatgaagtttataagtatattgttactaattggctggctaaggttaatactcaaattgatctgattagaaagaagatgaaggaagctctggaaaatcaagctgaagctactaaggctattattaattatcaatataatcaatatactgaagaagaaaagaataatattaattttaatattgatgatctgtcttctaagctgaatgaatctattaataaggctatgattaatattaataagtttctgaatcaatgttctgtttcttatctgatgaattctatgattccttatggagttaagagactggaagattttgatgcttctctgaaggatgctctgctgaagtatatttatgataatagaggaactctgattggacaagttgatagactgaaggataaggttaataatactctgtctactgatattccttttcaactgtctaagtatgttgataatcaaagactgctgtctacttttactgaatatattaagaatattattaatacttctattctgaatctgagatatgaatctaatcatctgattgatctgtctagatatgcttctaagattaatattggatctaaggttaattttgatcctattgataagaatcaaattcaactgtttaatctggaatcttctaagattgaagttattctgaagaatgctattgtttataattctatgtatgaaaatttttctacttctttttggattagaattcctaagtattttaattctatttctctgaataatgaatatactattattaattgtatggaaaataattctggatggaaggtttctctgaattatggagaaattatttggactctgcaagatactcaagaaattaagcaaagagttgtttttaagtattctcaaatgattaatatttctgattatattaatagatggatttttgttactattactaataatagactgaataattctaagatttatattaatggaagactgattgatcaaaagcctatttctaatctgggaaatattcatgcttctaataatattatgtttaagctggatggatgtagagatactcatagatatatttggattaagtattttaatctgtttgataaggaactgaatgaaaaggaaattaaggatctgtatgataatcaatctaattctggaattctgaaggatttttggggagattatctgcaatatgataagccttattatatgctgaatctgtatgatcctaataagtatgttgatgttaataatgttggaattagaggatatatgtatctgaagggacctagaggatctgttatgactactaatatttatctgaattcttctctgtatagaggaactaagtttattattaagaagtatgcttctggaaataaggataatattgttagaaataatgatagagtttatattaatgttgttgttaagaataaggaatatagactggctactaatgcttctcaagctggagttgaaaagattctgtctgctctggaaattcctgatgttggaaatctgtctcaagttgttgttatgaagtctaagaatgatcaaggaattactaataagtgtaagatgaatctgcaagataataatggaaatgatattggatttattggatttcatcaatttaataatattgctaagctggttgcttctaattggtataatagacaaattgaaagatcttctagaactctgggatgttcttgggaatttattcctgttgatgatggatggggagaaagacctctgtaa

SEQ ID NO: 51 - DNA, 3891 bp, Artificial Sequence
  BoNT/A,  A. thaliana-modified 3
atgccatttgtgaacaaacaatttaattataaagatcctgtgaacggcgtcgacattgcatacattaagatccctaatgcgggacaaatgcagccggtgaaagctttcaagatccataataagatttgggtgatacctgaacgggatacattcactaacccagaagagggagatctgaatccgccaccggaagctaaacaagtgcctgtctcttactatgattctacttacctgtctacggataacgagaaggataactacctgaaaggtgttacaaaactgttcgaaagaatatactctacggacctgggtaggatgctgctgacctctatcgtaaggggaattccattttggggtggctctacaattgacactgagctgaaagtcatcgatacgaactgtattaatgtcattcagccagacggttcttatagatctgaagagctgaacctggtaatcattgggccatctgccgatattatccaatttgagtgtaagtcttttggtcatgaggttctgaacctgactcgtaacggatatggttctacacaatatatcaggttttctccagatttcactttcgggttcgaagagtctctggaggtagatactaaccctctgctgggtgcgggtaaattcgccacagacccagctgtaacactggctcacgaactgattcacgccggacatagactgtacggtatagcaattaatcctaacagggtttttaaggttaacaccaatgcatattacgagatgtctggcctggaagtatctttcgaagagctgcgtacgtttggtgggcacgacgctaaatttattgactctctgcaggaaaacgaattccggctgtattactataataaatttaaagatatcgcgtctacactgaacaaggccaagtctatcgtgggaactaccgcttctctgcaatatatgaagaatgtatttaaagaaaaatacctgctgtctgaggacacttctggtaaattttctgttgacaagctgaaatttgataagctgtataagatgctgacagagatctatactgaagataacttcgttaagttctttaaagtgctgaaccgtaagacctacctgaattttgataaagccgtgttcaagattaatatcgtgcctaaggtgaactacactatttacgatggattcaatctgcgtaatacgaatctggccgcgaatttcaatggacagaacacagagatcaataacatgaatttcaccaagctgaagaactttacgggactgtttgagttctacaaactgctgtgtgttagaggtatcataacatctaaaactaaatctctggacaagggatacaacaaagctctgaatgatctgtgtataaaggtcaacaattgggatctgttcttttctccgtctgaagataacttcacgaacgacctgaataaaggagaggaaattacctctgatacaaatatcgaggccgctgaggaaaatatatctctggacctgatccaacagtattacctgactttcaatttcgataatgaacctgagaatatttctatagaaaatctgtcttctgatattatcggacaactggaactgatgccaaatattgaacgatttcctaatggcaagaaatatgagctggacaagtacaccatgttccattatctgagagcccaagaattcgaacacggcaaatctcgaatcgcgctgactaactctgtaaatgaggcactgctgaatccttctcgtgtatacacattcttttcttctgactatgtgaagaaagttaataaggcaaccgaggcagctatgttcctgggctgggtcgagcaactggtgtatgatttcaccgatgaaacatctgaagtttctactacggataaaattgctgacattacaatcattataccttacatcggtcctgctctgaatataggcaacatgctgtataaagatgactttgtcggagcgctgattttctctggtgctgttattctgctggagtttattccagaaatcgctatccctgttctggggaccttcgccctggtttcttatattgctaataaagtcctgacagttcagactatcgacaacgctctgtctaagagaaacgagaagtgggatgaggtttacaagtatatcgttacgaattggctggcaaaagttaacactcagatcgacctgatcaggaaaaagatgaaagaggcgctggaaaatcaagctgaagctacaaaggcaattataaattatcaatacaatcagtatactgaagaggaaaagaataacattaactttaacattgatgacctgtcttctaaactgaacgagtctataaacaaggcaatgattaatatcaacaagtttctgaaccaatgctctgtttcttacctgatgaactctatgatcccttatggcgttaagagactggaagattttgatgcatctctgaaagacgctctgctgaagtacatatatgacaatagaggaactctgattggacaggttgatcgactgaaagataaagttaataacactctgtctacagatattccgtttcaactgtctaagtacgttgataatcagaggctgctgtctactttcacagagtatattaagaacattataaatacatctatcctgaacctgagatacgaatctaatcatctgatagatctgtctaggtacgcatctaagataaatattgggtctaaagttaactttgatcctatcgataagaatcagatacagctgttcaacctggagtcttctaagattgaagttatactgaagaatgctatagtctataattctatgtacgaaaatttctctacatctttttggatacgaattccgaaatatttcaactctatatctctgaataacgagtatacgatcataaattgcatggagaataactctggatggaaagtgtctctgaattacggagaaattatctggactctgcaagatactcaggagatcaagcaacgggtggtctttaaatattctcaaatgattaatatatctgattacattaatagatggatcttcgttacaattactaataacagactgaataactctaagatctatattaacggaagactgatcgaccaaaagcctatctctaacctgggtaacatacatgcatctaacaatattatgttcaaactggatggatgtagagatacacataggtatatttggataaagtattttaacctgtttgataaagagctgaacgagaaagaaattaaggacctgtatgataaccagtctaactctggtatactgaaagatttttggggtgattacctgcaatacgacaagccatattacatgctgaatctgtacgatccaaacaagtacgtggatgtaaataacgttggaatacggggttacatgtatctgaaggggcctagagggtctgtcatgacgactaacatctatctgaattcttctctgtacagagggaccaagtttattataaaaaagtatgcttctggtaataaagataatatcgtcagaaacaatgacagagtctatatcaatgttgtggttaaaaacaaagaatatcgtctggctaccaatgcatctcaagctggagttgaaaaaatactgtctgctctggagatccctgatgttggtaacctgtctcaagtggtcgtaatgaaatctaagaacgatcagggaattaccaataagtgcaagatgaatctgcaagataacaatggtaatgatattgggtttattggcttccaccagtttaacaacatcgctaaactggtagcatctaactggtacaaccgacagattgaacgttcttctaggaccctgggatgctcttgggaatttatcccagtggatgatgggtggggtgagagaccgctgtaa

SEQ ID NO: 52 - DNA, 3891 bp, Artificial Sequence
  BoNT/A,  T. aestivum-modified 1
atgccatttgtcaacaagcaattcaattacaaggatccagtgaacggcgtggatatcgcgtatatcaagatacctaacgcggggcagatgcaaccagttaaggcttttaagatccacaacaagatctgggttatccccgagagagatactttcactaaccctgaagagggagacctgaacccgcccccagaggccaagcaggtcccggtgtcttactatgactcaacttacttgtccaccgataacgagaaggacaattacctgaagggagtgacaaagctttttgagcgtatctatagcactgacctgggcaggatgcttttaacatctatcgtacgcgggattcctttctgggggggatctaccatcgatactgagcttaaggtcatagacacaaattgcattaacgtcatccagccagacggttcatacaggtcggaggaactcaacctggtgatcattggcccgagcgcggacattatccaattcgaatgcaagagcttcggccacgaggtgctcaatttgactcgcaacgggtacggctccactcagtacatacggttctccccagattttaccttcggctttgaggaaagcctagaagttgacacgaacccgctcttgggcgctggcaagtttgccacggatccagccgttacgctggcacacgagctcatccatgccggtcataggctgtacgggatcgccatcaacccaaatcgtgtgttcaaggtaaataccaacgcgtactatgagatgtctgggctggaagtcagcttcgaggaactgcgcaccttcggcggacacgatgcaaaattcatcgactcgctacaagaaaacgagttcagactctactattacaacaagtttaaggacatcgccagcacactcaataaggctaagtcgattgttggtacgacagcttccctccaatacatgaagaacgtgttcaaggagaagtacctgttgtccgaggacacatccggcaagttcagcgtcgataagctgaaatttgataaactctataaaatgttaacagagatctatacagaggataatttcgtcaaattctttaaggttttgaacaggaagacctatctaaattttgacaaggcggttttcaagatcaacatcgtgccaaaagtcaactataccatctacgatggtttcaacctaagaaacaccaacctcgccgcgaacttcaatggccaaaatacagaaattaacaatatgaacttcacgaagctcaagaactttactgggctcttcgaattctacaagcttctgtgcgttcgtggtattataacctcgaagacaaagtctcttgacaagggttacaacaaggctcttaatgatctgtgcatcaaagtaaacaattgggatcttttcttttcgccaagtgaagataacttcaccaacgaccttaacaagggcgaggaaatcacttcggataccaacattgaggccgctgaagagaacatctcgctcgacctcattcaacagtactatctaaccttcaatttcgacaatgagcctgagaatatttcaatagaaaacctgtccagtgacatcattggccaactcgagctgatgccgaacatagagagattccccaacggcaagaaatacgaacttgataagtacactatgttccattacctgcgtgcacaggagttcgagcacgggaagtctcggatcgccctcacgaacagtgtcaacgaggcacttctcaacccgtcgcgcgtgtacacctttttcagctccgactacgttaaaaaggtgaacaaggccaccgaggcggccatgttcctgggttgggttgagcaactggtctatgactttaccgacgagacctcagaggtctccacgactgacaagatcgcagatatcaccatcataatcccttacatcggcccagccttgaacatcggcaacatgttatacaaagatgactttgtgggtgccctgatattttccggagcggtcatccttctggagttcatacccgagatagcaattcctgtcctcggcactttcgctctcgtctcatacatcgcaaataaggttttgaccgtgcagaccatcgacaacgccttgagcaaaaggaatgagaagtgggacgaagtctacaagtacatagtcacgaattggctcgcgaaggtcaacacccagatcgatctcatccggaagaaaatgaaagaggccctggagaaccaagcggaggccaccaaggcgattatcaactaccaatacaatcagtacacagaggaagagaagaacaatataaactttaatatagatgacctcagctcaaagctgaacgagtccatcaataaggcaatgatcaacattaacaagttcctgaatcagtgcagcgtgtcttatctgatgaattccatgatcccatatggtgtgaagcgattggaggacttcgacgcttcgctcaaggacgcgctcctaaagtatatatacgataaccgcgggacgttgatcggccaagtggaccgtctcaaagacaaggtcaacaatacgctttccacggacatcccgtttcaactttctaagtacgttgataaccaaaggttgctatctacctttaccgaatatattaagaacatcataaatacatcgatcttaaacttgcgctacgagtctaatcacctcatcgacctgagccggtacgcatcaaagattaatattggttccaaagtgaacttcgaccccattgacaagaaccaaatccaactctttaacctcgagtccagcaagatcgaggtcatcttgaagaacgctatcgtctacaactcgatgtacgagaacttcagcacctctttctggattaggatccctaagtacttcaactccatctcactcaataacgagtatactatcattaactgcatggaaaacaattccggatggaaagtttcacttaactacggggagattatctggaccctgcaagatacccaggagataaagcagcgcgtggtatttaagtactcccagatgatcaacataagtgactacattaaccgctggatctttgtaaccatcacaaataacagactcaacaatagcaagatttacatcaatggacgactaatcgatcagaaaccaatcagcaacctcggaaatattcatgcctcgaacaatattatgttcaagctcgacggttgccgggatacacatagatacatttggataaagtactttaacttgttcgacaaagaactcaacgagaaggagattaaggacctctacgacaaccagagtaattcagggattcttaaagacttttggggggactacctccaatacgacaagccgtattacatgcttaacctgtacgacccaaacaagtatgtggacgttaacaatgtggggattaggggctatatgtacctcaaggggccccgaggatctgtaatgaccactaacatctacttgaacagctcattgtaccgcggaacgaaattcatcattaagaaatacgccagcggcaacaaggacaacattgtgcgcaataacgaccgggtgtacatcaacgtcgtggtcaagaacaaggagtataggcttgcaacgaatgctagtcaagccggtgttgagaagatcctctcagcgctggaaatccccgacgtgggcaacctgtcccaggtggttgtgatgaagtccaaaaatgaccagggcattaccaacaagtgtaagatgaatctgcaggacaacaatggcaacgatatcggattcatcggcttccaccaattcaacaatattgccaagttagtcgcttcaaactggtataaccgccaaatcgagaggtccagtcggacgctagggtgtagctgggaatttatcccggtggatgatggctggggagagaggcccctataa

SEQ ID NO: 53 - DNA, 3891 bp, Artificial Sequence
  BoNT/A,  T. aestivum-modified 2
atgccattcgtgaacaagcaattcaactacaaggacccagtgaacggcgtggacatcgcctacatcaagatcccaaacgccggccaaatgcaaccagtgaaggccttcaagatccacaacaagatctgggtgatcccagagagggacaccttcaccaacccagaggagggcgacctcaacccaccaccagaggccaagcaagtgccagtgtcctactacgactccacctacctctccaccgacaacgagaaggacaactacctcaagggcgtgaccaagctcttcgagaggatctactccaccgacctcggcaggatgctcctcacctccatcgtgaggggcatcccattctggggcggctccaccatcgacaccgagctcaaggtgatcgacaccaactgcatcaacgtgatccaaccagacggctcctacaggtccgaggagctcaacctcgtgatcatcggcccatccgccgacatcatccaattcgagtgcaagtccttcggccacgaggtgctcaacctcaccaggaacggctacggctccacccaatacatcaggttctccccagacttcaccttcggcttcgaggagtccctcgaggtggacaccaacccactcctcggcgccggcaagttcgccaccgacccagccgtgaccctcgcccacgagctcatccacgccggccacaggctctacggcatcgccatcaacccaaacagggtgttcaaggtgaacaccaacgcctactacgagatgtccggcctcgaggtgtccttcgaggagctcaggaccttcggcggccacgacgccaagttcatcgactccctccaagagaacgagttcaggctctactactacaacaagttcaaggacatcgcctccaccctcaacaaggccaagtccatcgtgggcaccaccgcctccctccaatacatgaagaacgtgttcaaggagaagtacctcctctccgaggacacctccggcaagttctccgtggacaagctcaagttcgacaagctctacaagatgctcaccgagatctacaccgaggacaacttcgtgaagttcttcaaggtgctcaacaggaagacctacctcaacttcgacaaggccgtgttcaagatcaacatcgtgccaaaggtgaactacaccatctacgacggcttcaacctcaggaacaccaacctcgccgccaacttcaacggccaaaacaccgagatcaacaacatgaacttcaccaagctcaagaacttcaccggcctcttcgagttctacaagctcctctgcgtgaggggcatcatcacctccaagaccaagtccctcgacaagggctacaacaaggccctcaacgacctctgcatcaaggtgaacaactgggacctcttcttctccccatccgaggacaacttcaccaacgacctcaacaagggcgaggagatcacctccgacaccaacatcgaggccgccgaggagaacatctccctcgacctcatccaacaatactacctcaccttcaacttcgacaacgagccagagaacatctccatcgagaacctctcctccgacatcatcggccaactcgagctcatgccaaacatcgagaggttcccaaacggcaagaagtacgagctcgacaagtacaccatgttccactacctcagggcccaagagttcgagcacggcaagtccaggatcgccctcaccaactccgtgaacgaggccctcctcaacccatccagggtgtacaccttcttctcctccgactacgtgaagaaggtgaacaaggccaccgaggccgccatgttcctcggctgggtggagcaactcgtgtacgacttcaccgacgagacctccgaggtgtccaccaccgacaagatcgccgacatcaccatcatcatcccatacatcggcccagccctcaacatcggcaacatgctctacaaggacgacttcgtgggcgccctcatcttctccggcgccgtgatcctcctcgagttcatcccagagatcgccatcccagtgctcggcaccttcgccctcgtgtcctacatcgccaacaaggtgctcaccgtgcaaaccatcgacaacgccctctccaagaggaacgagaagtgggacgaggtgtacaagtacatcgtgaccaactggctcgccaaggtgaacacccaaatcgacctcatcaggaagaagatgaaggaggccctcgagaaccaagccgaggccaccaaggccatcatcaactaccaatacaaccaatacaccgaggaggagaagaacaacatcaacttcaacatcgacgacctctcctccaagctcaacgagtccatcaacaaggccatgatcaacatcaacaagttcctcaaccaatgctccgtgtcctacctcatgaactccatgatcccatacggcgtgaagaggctcgaggacttcgacgcctccctcaaggacgccctcctcaagtacatctacgacaacaggggcaccctcatcggccaagtggacaggctcaaggacaaggtgaacaacaccctctccaccgacatcccattccaactctccaagtacgtggacaaccaaaggctcctctccaccttcaccgagtacatcaagaacatcatcaacacctccatcctcaacctcaggtacgagtccaaccacctcatcgacctctccaggtacgcctccaagatcaacatcggctccaaggtgaacttcgacccaatcgacaagaaccaaatccaactcttcaacctcgagtcctccaagatcgaggtgatcctcaagaacgccatcgtgtacaactccatgtacgagaacttctccacctccttctggatcaggatcccaaagtacttcaactccatctccctcaacaacgagtacaccatcatcaactgcatggagaacaactccggctggaaggtgtccctcaactacggcgagatcatctggaccctccaagacacccaagagatcaagcaaagggtggtgttcaagtactcccaaatgatcaacatctccgactacatcaacaggtggatcttcgtgaccatcaccaacaacaggctcaacaactccaagatctacatcaacggcaggctcatcgaccaaaagccaatctccaacctcggcaacatccacgcctccaacaacatcatgttcaagctcgacggctgcagggacacccacaggtacatctggatcaagtacttcaacctcttcgacaaggagctcaacgagaaggagatcaaggacctctacgacaaccaatccaactccggcatcctcaaggacttctggggcgactacctccaatacgacaagccatactacatgctcaacctctacgacccaaacaagtacgtggacgtgaacaacgtgggcatcaggggctacatgtacctcaagggcccaaggggctccgtgatgaccaccaacatctacctcaactcctccctctacaggggcaccaagttcatcatcaagaagtacgcctccggcaacaaggacaacatcgtgaggaacaacgacagggtgtacatcaacgtggtggtgaagaacaaggagtacaggctcgccaccaacgcctcccaagccggcgtggagaagatcctctccgccctcgagatcccagacgtgggcaacctctcccaagtggtggtgatgaagtccaagaacgaccaaggcatcaccaacaagtgcaagatgaacctccaagacaacaacggcaacgacatcggcttcatcggcttccaccaattcaacaacatcgccaagctcgtggcctccaactggtacaacaggcaaatcgagaggtcctccaggaccctcggctgctcctgggagttcatcccagtggacgacggctggggcgagaggccactctaa

SEQ ID NO: 54 - DNA, 3891 bp, Artificial Sequence
  BoNT/A,  T. aestivum-modified 3
atgccatttgtgaataagcagtttaactacaaggaccccgttaacggtgtggacatcgcgtacattaagatccctaatgctggacaaatgcaaccagttaaggccttcaagattcacaataagatctgggtcatccctgagagggacacctttactaatcccgaggaaggcgaccttaacccgcctccggaggcgaagcaagttccagtttcatactatgattccacgtacttgtccacagataatgagaaggataattacctcaagggtgttacgaagctcttcgaaagaatctatagcaccgacctaggacgcatgttgcttacatcgattgtgcgcggaatcccattctggggcgggagcaccattgatacagagcttaaggtcatcgatacgaactgtattaacgtcatccagccggacggcagttaccgctccgaggaactcaatctcgttatcattggcccgtcggccgacatcattcaattcgaatgcaagtcttttggtcacgaggtgctgaatctcaccaggaacggctacggatccacccaatacatccggtttagccctgactttacattcggcttcgaggaatccttggaggtggacactaacccacttctaggcgccggcaagtttgccaccgaccccgctgtcaccctggcccatgagctcatccatgcgggccacagactctacggaatcgcgatcaacccaaaccgcgtgttcaaggtgaatactaacgcttactatgaaatgtcagggctggaagtgtctttcgaggaactccgcacgttcggcggtcacgacgcaaagttcatcgactctttgcaagagaatgagtttcgcttgtattactataataagttcaaggacatcgcatccaccctgaacaaggccaagagcatcgttggtactacagcttccctccaatatatgaagaacgtgttcaaggagaagtacctgctctcagaggacacgagcggcaagttttccgtggacaagctcaagttcgacaagctatacaagatgctcactgagatctacacggaggataatttcgtgaagttctttaaggtgctcaaccgtaagacctacctcaacttcgacaaggctgtcttcaagatcaacatcgtcccgaaggtcaactacactatttacgacggattcaacctacgcaacaccaacctagcagccaacttcaatggacagaacacggaaatcaacaatatgaacttcactaagctgaagaacttcacgggcctcttcgaattctacaagctcctttgcgtcaggggtatcattactagtaagacaaagagcttggataaggggtacaataaggccttgaacgacctctgcatcaaggtgaacaattgggacctgtttttctcgccatctgaagacaactttaccaacgatcttaacaagggagaggaaatcacctcagacaccaacatcgaggcagcggaggaaaacatctcactggatctgatccaacagtactatctcaccttcaatttcgacaacgagccggagaatatttcgatcgagaatctctcctcagacatcattggccaactcgaactcatgcccaatatcgagcggtttcctaacggtaagaagtacgagcttgacaagtacacaatgttccactatctacgtgcacaggagttcgaacatggaaagtccaggatcgccctcacgaactcggtgaacgaggcgttgctgaacccatctagagtctatacatttttctcctcagactacgtcaagaaggttaacaaggcgaccgaggctgcaatgttcctgggttgggtcgaacagcttgtgtatgactttaccgatgagacgtcggaggttagcacaaccgataagattgctgatatcacaatcattatcccatacattgggcccgcactcaacatcggcaatatgctttacaaggacgatttcgtgggggccctcatcttttccggcgcggtcatccttctcgagtttattccggagatcgcaatccctgttctgggcaccttcgccttggtgtcctacatcgccaacaaggttctaaccgtgcaaactatcgataacgcactctctaagcggaatgagaagtgggacgaggtttacaagtacatcgtcacaaactggctagccaaggtcaatacgcaaatcgatcttatccgcaagaagatgaaggaggctctcgaaaaccaagcggaggccaccaaggcgatcattaattaccagtacaaccagtacaccgaagaggaaaagaataacattaacttcaacattgatgacctttcatctaagctgaacgagagcatcaacaaggccatgatcaacatcaacaagtttctcaatcaatgctcagtgagttacttgatgaactccatgatcccatatggagtcaagcgtctcgaggacttcgacgcgagcctcaaggatgccctgctcaagtacatttatgataacaggggcaccttgattggccaggtcgataggctaaaggacaaggttaacaatactctcagcaccgacatccccttccagctgtcaaagtacgtcgacaaccaaaggcttttgtccactttcactgagtacatcaagaacattatcaataccagcatcctgaacctccgttatgagtcgaaccacctgatcgatctgtcgcgctacgcctcgaagatcaacattggaagcaaggtgaacttcgatcccatcgacaagaaccagatccagctctttaacttggagtccagcaagatcgaggtgatcctgaagaacgctattgtgtataacagtatgtacgagaatttctccacgagcttctggattaggatccccaagtatttcaactcgatctccctgaacaatgagtacacaatcattaactgcatggagaacaattcagggtggaaggtcagcctgaactacggcgagatcatttggaccctccaggacacgcaagaaatcaagcagcgggtggttttcaagtattcacagatgatcaatatcagtgactatatcaaccggtggatctttgtgaccatcaccaacaatagactcaacaattccaagatctacatcaacggcagactcattgatcaaaagcctatttctaaccttggtaatattcatgcgtcgaacaatatcatgtttaagcttgacgggtgcagagacactcaccggtacatctggatcaagtacttcaacctctttgataaggagctcaatgagaaggaaattaaggatctgtatgataatcaaagcaactctgggatccttaaggacttttggggggattacctgcaatatgataagccatactatatgttgaacctgtacgacccgaataagtatgtcgacgttaacaatgtcgggattaggggttacatgtacctgaaggggccaaggggctccgtgatgaccacaaacatctacttgaacagctctttgtaccggggcacgaagttcatcattaagaagtacgcctcaggtaacaaggacaatatcgtccgtaacaatgaccgcgtgtacatcaatgtggtcgtgaagaacaaggagtacaggctggctactaacgcgtctcaagccggcgtggagaagatcctctcggcactggagatcccagatgtggggaacctcagccaggttgtggtcatgaagtctaagaacgaccaaggcatcacaaacaagtgtaagatgaatctgcaggataacaatgggaacgacatcgggtttatcggcttccatcaatttaacaacatcgctaagctagtggcctccaactggtacaacaggcagattgagaggagtagccgcacccttgggtgcagttgggaattcatcccggtggacgacggttggggagagaggccactgtaa

SEQ ID NO: 55 - DNA, 3891 bp, Artificial Sequence
  BoNT/A,  Z. mays-modified 1
atgccctttgttaacaagcagttcaattacaaggaccccgtcaacggtgtcgacattgcgtacattaagatcccgaatgccggtcaaatgcagcctgtcaaggccttcaagatccacaacaagatctgggtcatcccggagcgggataccttcaccaacccagaggaaggagatctaaatcctccgccagaagctaaacaggtgcccgtgtcttattacgactctacctacctgtcgaccgataacgagaaggataattacctgaagggtgtgacgaaactatttgagcgtatctacagcaccgatctgggcaggatgctgttgactagcatcgttagagggattccattctggggcggttctacgattgacactgagctcaaagtgatcgacactaactgcataaacgttatacaaccagacggatcctataggtccgaggaacttaaccttgtaattatcggtccatctgccgacatcattcagtttgaatgtaaaagctttggccatgaggtccttaacctcactaggaatggctacggctctacacaatatattcggttttcccctgacttcacctttgggttcgaggaatcgctggaggttgacacgaaccccctgctcggcgcaggcaagtttgccaccgatccggctgtgacgttggcacatgaactgatccatgcgggccacagactatatgggatcgctatcaatcccaaccgcgtcttcaaggtaaatacaaatgcctactatgagatgtccgggctcgaggtctcgttcgaggaactgagaacattcggcggacacgacgcgaagttcatagacagtctacaggagaacgaattccggttatattactataataaatttaaagacatagcatcaaccctcaacaaggccaagtccatcgttggcacgaccgcctcgttacagtacatgaaaaatgtcttcaaagaaaaatatctactctccgaggataccagtggcaagttctctgttgataagctgaagttcgataagctctacaagatgctgacagagatctacactgaagacaacttcgtgaaattctttaaggtcctcaataggaagacatacctcaatttcgataaagcggtgttcaagatcaacattgtgcctaaagtgaactacactatctatgatggattcaatctcagaaatactaacctggctgccaacttcaatggccagaacactgagatcaacaatatgaacttcactaagcttaagaacttcacaggtctttttgaattctacaagttgctgtgtgtacgcggcataatcacatcaaaaactaaatcactagacaaaggctacaacaaggcacttaacgatctctgtattaaagtcaacaattgggacctttttttctccccatctgaagacaactttacgaatgaccttaacaagggagaggaaatcacctccgatacaaatatcgaggcggctgaagagaacatcagtttggacctgatccagcaatactatctcaccttcaacttcgataacgagcctgaaaacatttccatagagaatctgagcagtgacatcattggccaactagagcttatgccgaacatcgagaggttccctaacgggaagaaatatgagctggacaagtacacgatgtttcactacctgcgcgcccaggaatttgaacatggcaagagcaggatagcgttgactaatagcgttaacgaggcactcctgaacccctcgcgagtctatacgttcttttcgtccgactacgttaaaaaggtaaataaggccacagaggctgccatgtttctgggatgggttgaacagctggtttacgacttcaccgatgaaaccagcgaggtttcaacaaccgacaaaattgcagatatcacaattatcataccctatatcggccctgcgttgaacataggcaatatgctctataaggacgattttgtgggcgcgcttatattcagcggcgctgtcatcctccttgagttcattccggagatagccatccccgtcctgggaactttcgcgcttgtcagttacattgcaaataaagtgcttacggtgcagaccattgacaacgcgctgagtaaaaggaacgagaagtgggatgaagtgtacaagtacattgttaccaactggcttgcaaaggttaacacacaaattgacctcatcagaaaaaagatgaaggaggccctcgagaaccaggctgaggctaccaaggcgattatcaactaccagtacaaccagtacactgaggaagagaaaaacaatatcaatttcaacatcgatgacctttcttcaaagctcaacgagagcatcaacaaagccatgataaacatcaacaagttcctcaatcagtgcagtgtcagctatttgatgaatagcatgatcccctatggcgtgaagcgccttgaggactttgacgccagcctgaaggacgccttgttaaagtacatctacgataaccggggcacgctcatcggtcaggtggaccgcctgaaggataaagttaataacacattgtccacggacattccattccaactctcgaagtacgtggataatcagcgactcctttccaccttcacagagtacattaagaatattataaatacttcgatccttaacttgaggtacgagtcgaaccacctcatcgacctgagccggtacgctagcaagatcaacattgggtcaaaagttaatttcgacccgattgacaagaaccagatccaactcttcaatttggagtcgtccaagattgaagtgatactcaagaatgcaatcgtatacaattctatgtacgagaacttctcaacatcattctggattcgcattccaaagtattttaacagcatatctctgaacaatgagtacacgatcattaactgcatggagaacaattcaggatggaaggtgagccttaattacggagagattatctggaccctgcaggatacccaggaaatcaagcaacgagtagtctttaagtacagccaaatgattaacatcagtgattacatcaataggtggatcttcgtgaccatcacgaacaatcgcttgaataactccaagatatatattaatggcagactcatcgaccagaagccaattagcaatctgggaaacatacacgcttctaataacataatgtttaagttagatggatgcagggatacccacagatacatttggatcaagtatttcaacctgtttgacaaagaactgaatgagaaggagatcaaggacctctacgacaaccaaagcaactctggcattttaaaggatttttggggggactatttacagtatgacaagccttactatatgctaaacctgtacgacccgaataaatatgtggatgtcaacaatgtgggtattcgtgggtacatgtacctaaagggtcctcgtgggtcagtgatgactaccaacatctatttgaacagttcactctaccgggggactaagttcatcataaagaaatacgcttccgggaacaaggataacatcgttaggaacaatgatcgcgtgtacataaacgtcgttgtcaagaacaaggagtaccggttggccacaaacgcttcccaggccggcgtggagaagatcctctctgcactcgagattccggatgtaggtaacttgtcccaagtggtcgtgatgaagtccaagaatgaccagggcatcacgaataagtgcaagatgaacttacaggacaacaatggtaacgatattggttttatcggtttccatcaattcaacaatatagcgaagctggtcgcgtcgaactggtataaccgtcaaatagaacgctcttcacgcacgttggggtgctcatgggagttcattccggtcgacgatgggtggggagagcgtccactctaa

SEQ ID NO: 56 - DNA, 3891 bp, Artificial Sequence
  BoNT/A,  Z. mays-modified 2
atgccattcgtgaacaagcagttcaactacaaggacccagtgaacggcgtggacatcgcctacatcaagatcccaaacgccggccagatgcagccagtgaaggccttcaagatccacaacaagatctgggtgatcccagagagggacaccttcaccaacccagaggagggcgacctgaacccaccaccagaggccaagcaggtgccagtgagctactacgacagcacctacctgagcaccgacaacgagaaggacaactacctgaagggcgtgaccaagctgttcgagaggatctacagcaccgacctgggcaggatgctgctgaccagcatcgtgaggggcatcccattctggggcggcagcaccatcgacaccgagctgaaggtgatcgacaccaactgcatcaacgtgatccagccagacggcagctacaggagcgaggagctgaacctggtgatcatcggcccaagcgccgacatcatccagttcgagtgcaagagcttcggccacgaggtgctgaacctgaccaggaacggctacggcagcacccagtacatcaggttcagcccagacttcaccttcggcttcgaggagagcctggaggtggacaccaacccactgctgggcgccggcaagttcgccaccgacccagccgtgaccctggcccacgagctgatccacgccggccacaggctgtacggcatcgccatcaacccaaacagggtgttcaaggtgaacaccaacgcctactacgagatgagcggcctggaggtgagcttcgaggagctgaggaccttcggcggccacgacgccaagttcatcgacagcctgcaggagaacgagttcaggctgtactactacaacaagttcaaggacatcgccagcaccctgaacaaggccaagagcatcgtgggcaccaccgccagcctgcagtacatgaagaacgtgttcaaggagaagtacctgctgagcgaggacaccagcggcaagttcagcgtggacaagctgaagttcgacaagctgtacaagatgctgaccgagatctacaccgaggacaacttcgtgaagttcttcaaggtgctgaacaggaagacctacctgaacttcgacaaggccgtgttcaagatcaacatcgtgccaaaggtgaactacaccatctacgacggcttcaacctgaggaacaccaacctggccgccaacttcaacggccagaacaccgagatcaacaacatgaacttcaccaagctgaagaacttcaccggcctgttcgagttctacaagctgctgtgcgtgaggggcatcatcaccagcaagaccaagagcctggacaagggctacaacaaggccctgaacgacctgtgcatcaaggtgaacaactgggacctgttcttcagcccaagcgaggacaacttcaccaacgacctgaacaagggcgaggagatcaccagcgacaccaacatcgaggccgccgaggagaacatcagcctggacctgatccagcagtactacctgaccttcaacttcgacaacgagccagagaacatcagcatcgagaacctgagcagcgacatcatcggccagctggagctgatgccaaacatcgagaggttcccaaacggcaagaagtacgagctggacaagtacaccatgttccactacctgagggcccaggagttcgagcacggcaagagcaggatcgccctgaccaacagcgtgaacgaggccctgctgaacccaagcagggtgtacaccttcttcagcagcgactacgtgaagaaggtgaacaaggccaccgaggccgccatgttcctgggctgggtggagcagctggtgtacgacttcaccgacgagaccagcgaggtgagcaccaccgacaagatcgccgacatcaccatcatcatcccatacatcggcccagccctgaacatcggcaacatgctgtacaaggacgacttcgtgggcgccctgatcttcagcggcgccgtgatcctgctggagttcatcccagagatcgccatcccagtgctgggcaccttcgccctggtgagctacatcgccaacaaggtgctgaccgtgcagaccatcgacaacgccctgagcaagaggaacgagaagtgggacgaggtgtacaagtacatcgtgaccaactggctggccaaggtgaacacccagatcgacctgatcaggaagaagatgaaggaggccctggagaaccaggccgaggccaccaaggccatcatcaactaccagtacaaccagtacaccgaggaggagaagaacaacatcaacttcaacatcgacgacctgagcagcaagctgaacgagagcatcaacaaggccatgatcaacatcaacaagttcctgaaccagtgcagcgtgagctacctgatgaacagcatgatcccatacggcgtgaagaggctggaggacttcgacgccagcctgaaggacgccctgctgaagtacatctacgacaacaggggcaccctgatcggccaggtggacaggctgaaggacaaggtgaacaacaccctgagcaccgacatcccattccagctgagcaagtacgtggacaaccagaggctgctgagcaccttcaccgagtacatcaagaacatcatcaacaccagcatcctgaacctgaggtacgagagcaaccacctgatcgacctgagcaggtacgccagcaagatcaacatcggcagcaaggtgaacttcgacccaatcgacaagaaccagatccagctgttcaacctggagagcagcaagatcgaggtgatcctgaagaacgccatcgtgtacaacagcatgtacgagaacttcagcaccagcttctggatcaggatcccaaagtacttcaacagcatcagcctgaacaacgagtacaccatcatcaactgcatggagaacaacagcggctggaaggtgagcctgaactacggcgagatcatctggaccctgcaggacacccaggagatcaagcagagggtggtgttcaagtacagccagatgatcaacatcagcgactacatcaacaggtggatcttcgtgaccatcaccaacaacaggctgaacaacagcaagatctacatcaacggcaggctgatcgaccagaagccaatcagcaacctgggcaacatccacgccagcaacaacatcatgttcaagctggacggctgcagggacacccacaggtacatctggatcaagtacttcaacctgttcgacaaggagctgaacgagaaggagatcaaggacctgtacgacaaccagagcaacagcggcatcctgaaggacttctggggcgactacctgcagtacgacaagccatactacatgctgaacctgtacgacccaaacaagtacgtggacgtgaacaacgtgggcatcaggggctacatgtacctgaagggcccaaggggcagcgtgatgaccaccaacatctacctgaacagcagcctgtacaggggcaccaagttcatcatcaagaagtacgccagcggcaacaaggacaacatcgtgaggaacaacgacagggtgtacatcaacgtggtggtgaagaacaaggagtacaggctggccaccaacgccagccaggccggcgtggagaagatcctgagcgccctggagatcccagacgtgggcaacctgagccaggtggtggtgatgaagagcaagaacgaccagggcatcaccaacaagtgcaagatgaacctgcaggacaacaacggcaacgacatcggcttcatcggcttccaccagttcaacaacatcgccaagctggtggccagcaactggtacaacaggcagatcgagaggagcagcaggaccctgggctgcagctgggagttcatcccagtggacgacggctggggcgagaggccactgtaa

SEQ ID NO: 57 - DNA, 3891 bp, Artificial Sequence
  BoNT/A,  Z. mays-modified 3
atgccatttgtgaataagcaattcaactacaaggatcccgtcaacggggttgacatagcttacatcaaaatcccgaatgctggacagatgcagcctgttaaggccttcaagatccacaacaagatttgggttatcccggaaagggatacctttactaacccagaagagggtgatctgaacccacctccggaggcaaagcaagttcctgtgagctactatgattcaacctatctgagtaccgataatgaaaaggataattacctgaagggggtgactaagctctttgagcggatctactccaccgacctggggaggatgcttctgacgagcatagtcaggggtatcccattttggggcggttccactatcgataccgagctgaaagtgatcgacacaaattgcataaacgtgatacaacccgacggctcgtacagatccgaagagctgaaccttgttatcattggcccgtccgccgacatcatacagttcgaatgtaaatcattcggtcacgaagtgcttaacttgaccagaaatggatacggctccacgcagtatattcgcttctccccagactttaccttcggttttgaagagagcctggaggtggacacgaatcctctcctgggggcaggcaagttcgctaccgaccccgcagtcaccctggctcatgagctgattcatgccggacacaggctgtacggtatcgccattaatccaaatagagtgttcaaagtcaacaccaacgcatattacgagatgtctggactcgaggtttctttcgaggaactgcgcacatttgggggccacgatgcaaagttcatcgacagcctccaagagaatgagttccgcctctactattacaataagttcaaggatatcgcgagtactctgaacaaggccaagtcgatcgttggcacaacggcctcattgcagtacatgaaaaacgtgttcaaggaaaagtatttgctctcagaggacacctcagggaagttttcagttgataaactcaagttcgacaagctttacaagatgctgaccgagatctacaccgaggacaattttgtgaagttctttaaagtcctgaaccggaagacatatttgaacttcgataaggctgtcttcaagatcaatatcgtgccgaaggtgaactacaccatctacgatggatttaacttgcggaacactaaccttgctgcgaactttaatggccaaaataccgaaatcaacaatatgaatttcaccaagcttaagaacttcacaggcctcttcgagttctacaagctgttgtgcgtgcgtggtataattacatctaagactaaatcactcgacaagggctacaacaaagcactcaatgacctgtgcattaaagtgaacaattgggacctgttctttagcccgtcggaagacaatttcacaaacgacttgaacaaaggcgaggaaatcacatctgataccaatatcgaggcggctgaagagaacatatccctcgacctgatacaacagtactatctcacatttaatttcgataacgagccggagaacattagcattgagaacctgagctctgacattatcgggcaacttgagctcatgcctaatatcgaaagattcccgaatgggaagaaatatgagcttgacaagtatactatgtttcattaccttagggctcaagagtttgagcatggtaaatcacggatcgcgctcacgaatagtgtcaacgaggcactcttgaacccgtcccgcgtctacacattcttttccagcgattacgtgaaaaaggtcaataaggccacagaagccgcgatgttcctcggatgggttgagcagctggtctacgacttcactgacgaaacatcagaagtgtccactacggataagattgccgatattaccattatcataccatatattgggccagctctgaacattggaaacatgctgtacaaagacgatttcgttggggcgcttatcttctctggagccgttatactgcttgaatttatccccgagatcgcaatacccgttctcggcacctttgctctggtttcatatatcgcgaacaaagttctgacggtgcagacaatcgataatgcgcttagtaagaggaacgagaagtgggatgaagtgtataaatacatagtgactaattggttggcaaaagtgaatacacagatagacctgatccgtaaaaagatgaaggaggccctcgaaaatcaagcggaggcgaccaaggccatcattaactaccagtataaccaatacacggaggaagagaaaaacaatatcaacttcaacattgatgacctctctagtaagctcaatgagtctataaacaaggcgatgattaacatcaataagtttcttaatcagtgctctgtcagctacctgatgaactctatgattccatacggcgtcaagcgcttggaagactttgatgctagcttgaaggacgcccttctcaagtacatctacgacaataggggaacactcatcggtcaggtcgaccgcctcaaggacaaagtcaataacacgctgtccacggatattccgtttcagctctcgaagtatgtcgacaaccagaggttgctgtcgaccttcactgagtatatcaagaacataatcaacacatccatcctgaatttgaggtacgagtctaaccaccttatcgatctgtcaagatacgccagtaagatcaacattggaagtaaagtcaatttcgaccccattgacaaaaaccagatccagctgttcaatctggagtcgagcaaaatcgaggttattctgaagaacgcgatcgtgtacaacagcatgtacgagaactttagcacctcgttctggataaggatccctaagtacttcaattcgattagcctgaacaatgaatacacgatcattaactgtatggagaacaattccggctggaaggtgtcactcaactatggcgagattatctggactctccaggacacgcaggagatcaagcagcgcgtggtcttcaagtactcccagatgataaacattagtgattatattaaccgttggatattcgtgactataactaacaatcggctcaataactctaagatctacatcaacggtagactgattgatcaaaaacctatcagcaaccttggcaacatacatgcgagcaacaatattatgttcaaactggacggctgtagggacacgcaccggtacatttggatcaagtacttcaatttgttcgacaaggagctcaacgagaaggagatcaaagatctctacgacaaccaaagcaactcggggatcctcaaggacttttggggggactacctgcaatacgataagccctactatatgctgaacttgtatgaccctaacaagtacgtggatgtgaacaatgtcggcattcgcggctacatgtacctgaagggccctagagggagtgtgatgactacgaacatttatctgaactcgtccctttatcgcggaaccaaattcattatcaagaaatacgcctctggcaacaaggacaacattgtccgtaacaatgatcgcgtgtatataaacgtggtcgttaagaacaaggaatatcgtctggcaacgaacgcttcgcaggccggcgtggagaagattttgagcgccctcgagatccccgatgtgggaaatctttctcaggttgtggtcatgaagtccaagaacgaccaaggtattaccaataagtgcaagatgaacctgcaggataacaatggcaacgacatcggtttcataggcttccaccagttcaacaatatcgctaagcttgtggccagcaattggtataacaggcagatcgaaaggtcctcaaggactctgggctgctcctgggagttcattcccgtcgacgatggttggggcgagcggccactgtaa

SEQ ID NO: 58 - DNA, 3891 bp, Artificial Sequence
  BoNT/A,  D. melanogaster-modified 1
atgccgttcgtcaacaagcaatttaattataaagatcccgttaacggtgtggatatcgcttatataaaaattccaaacgctgggcagatgcaaccagtgaaagcctttaagatccataataagatctgggttataccggagcgggacacatttacaaaccccgaagagggagacctgaaccccccgcccgaagcgaagcaagtaccggtttcctattacgactcgacctacctgtcgactgacaatgagaaggataactacttgaagggtgtgaccaagctcttcgaacgtatatatagcaccgacctgggacgcatgttgctcacgtccattgtgcgtggcatccccttctggggtggctccacgatagacacagagctgaaggtgatcgacactaattgtatcaatgtaatccagccggacggatcgtatcgtagcgaggaactgaatttagtgatcattggtccgagtgccgatatcattcaattcgagtgcaagagtttcggacatgaggtcttgaacctgacgcggaatggctatggtagcacccagtacatccggtttagccccgatttcaccttcggctttgaggaaagtcttgaggtcgatactaacccacttctcggcgcaggcaagttcgccaccgaccctgccgttactctagcccacgagctaattcacgcgggccatcgtctgtacggaattgctataaaccctaatcgagtgttcaaggtgaacaccaatgcttactatgaaatgtccgggctcgaggtcagcttcgaggaactgcgcacgttcggagggcacgatgcgaaattcattgatagtctccaggagaatgagtttcgcttgtactattacaacaagttcaaggatatcgcctccacccttaacaaggcgaagtcgatagttggaaccactgcatcactacagtatatgaaaaacgtctttaaggaaaagtatcttctgagcgaggacacttctggcaagttcagcgtggacaagttgaagttcgacaagctgtacaagatgctcaccgagatctacaccgaggacaactttgtgaagtttttcaaggtactgaaccgcaagacatatctgaatttcgacaaagccgtgttcaagatcaacatcgtgccgaaggtgaattatacaatctatgatggcttcaacctgcgaaatactaacctcgccgctaatttcaacggacagaatacggagataaacaatatgaacttcactaagctcaaaaacttcacaggattattcgaattttacaagctcctttgtgtaagaggcatcattacgtctaagactaaaagtctggataagggttacaacaaggcactgaatgacctctgcataaaggtgaataactgggacttgttctttagcccgtcggaggacaactttacgaatgacctaaataagggtgaggaaataacgagcgatacaaacattgaggcggccgaggaaaatatatcgttggatctgattcagcaatactatcttacttttaactttgacaatgagcccgaaaatatttcgattgagaaccttagttccgatatcattggtcagcttgagctgatgccgaacatcgagcgattcccaaatggcaaaaagtacgaactcgacaagtacaccatgttccactatttgcgcgcacaggagttcgagcacggaaagtcacggatcgcactcaccaactctgtgaacgaggccttgctgaacccttcacgcgtctacacattcttttcatcggattacgtgaagaaagttaacaaggccaccgaggccgcaatgttcctgggctgggtagaacagctggtctatgatttcacggacgaaacctctgaggttagcaccacggataaaatcgccgatatcacaattatcataccatacatcggccccgcgctgaacatcggcaacatgctgtacaaggatgactttgtgggtgcacttatcttctccggcgccgtcattttgttagaatttataccggagatagctattccagttctgggaacctttgcgctggtatcctacatcgccaataaggttttgactgtccaaacaattgacaacgccctctccaagcgaaacgaaaagtgggatgaggtctacaaatatattgttaccaattggctagctaaggttaacacgcaaatcgatctgattcgcaagaaaatgaaggaggctctggagaaccaagccgaggcgaccaaagctatcattaactaccagtacaatcaatacacagaggaagagaagaataacatcaactttaacatcgacgatctgtcgagcaagttgaacgagtcgattaacaaagctatgataaacataaataagtttttgaaccagtgttcagtgagctatctaatgaactcgatgatcccatacggagtgaagaggttggaggatttcgatgcgtcactgaaggatgccctcctaaaatacatctatgacaaccgtggcacgctcatcggccaagtggatagactgaaagataaggtaaataacacgctaagcacagatattccgtttcagctcagcaagtacgtggataaccagcgtttgctgtcgacattcacggagtatattaaaaatatcataaacacctccattctgaacttgcgctacgagagcaaccacctgatcgacctgtcccggtacgcctccaagattaacatcggtagtaaagtgaacttcgatcccatcgataaaaatcagattcagctcttcaatctggagtccagtaagatcgaggtgatcctgaagaatgcaattgtgtacaattccatgtatgaaaatttcagtaccagcttttggatccgaatccccaagtactttaactccatctcattgaataacgaatatacgatcattaattgcatggagaataactctggctggaaagtgagcctgaattacggagaaattatatggacacttcaggatacgcaggaaattaaacagcgcgtggtttttaagtacagccagatgatcaacatctcggactatatcaatcgttggatcttcgtcaccatcaccaataacaggttaaacaattccaagatatacataaatggtaggctgattgaccagaagccaatttcgaatctgggcaacattcatgcatcgaacaatatcatgttcaagttggatggctgccgcgacacgcatcgatacatttggataaaatactttaacttattcgacaaggaacttaatgaaaaagagatcaaggatctgtacgataatcagagcaatagcggaatcctgaaagacttctggggcgattatctccagtacgataagccttactatatgctgaatctgtacgaccccaataaatacgtggatgtcaataacgtgggcatacgcggctacatgtacctgaagggaccccgcgggtccgtgatgacgaccaatatttatctgaacagttccttgtaccggggcaccaagttcataattaaaaagtacgcttctggtaataaggacaacatcgtcagaaacaatgacagggtgtacatcaatgtcgtagtgaagaacaaagagtatcgactagccaccaacgcctcccaggccggagttgagaaaatcctgtcggccctggaaatccctgatgtggggaacctgtcccaagtggtcgtgatgaagagcaagaacgaccagggaattactaataagtgcaaaatgaacttgcaggataataacggtaatgatattggcttcataggcttccaccaattcaacaatattgcgaaactagtcgcctcgaactggtacaatcgccagatcgagcgctcaagtagaaccctgggatgctcttgggagtttattcccgtcgacgacggttggggcgagaggccattataa

SEQ ID NO: 59 - DNA, 3891 bp, Artificial Sequence
  BoNT/A,  D. melanogaster-modified 2
atgcccttcgtgaacaagcagttcaactacaaggatcccgtgaacggcgtggatatcgcctacatcaagatccccaacgccggccagatgcagcccgtgaaggccttcaagatccacaacaagatctgggtgatccccgagcgcgataccttcaccaaccccgaggagggcgatctgaaccccccccccgaggccaagcaggtgcccgtgagctactacgatagcacctacctgagcaccgataacgagaaggataactacctgaagggcgtgaccaagctgttcgagcgcatctacagcaccgatctgggccgcatgctgctgaccagcatcgtgcgcggcatccccttctggggcggcagcaccatcgataccgagctgaaggtgatcgataccaactgcatcaacgtgatccagcccgatggcagctaccgcagcgaggagctgaacctggtgatcatcggccccagcgccgatatcatccagttcgagtgcaagagcttcggccacgaggtgctgaacctgacccgcaacggctacggcagcacccagtacatccgcttcagccccgatttcaccttcggcttcgaggagagcctggaggtggataccaaccccctgctgggcgccggcaagttcgccaccgatcccgccgtgaccctggcccacgagctgatccacgccggccaccgcctgtacggcatcgccatcaaccccaaccgcgtgttcaaggtgaacaccaacgcctactacgagatgagcggcctggaggtgagcttcgaggagctgcgcaccttcggcggccacgatgccaagttcatcgatagcctgcaggagaacgagttccgcctgtactactacaacaagttcaaggatatcgccagcaccctgaacaaggccaagagcatcgtgggcaccaccgccagcctgcagtacatgaagaacgtgttcaaggagaagtacctgctgagcgaggataccagcggcaagttcagcgtggataagctgaagttcgataagctgtacaagatgctgaccgagatctacaccgaggataacttcgtgaagttcttcaaggtgctgaaccgcaagacctacctgaacttcgataaggccgtgttcaagatcaacatcgtgcccaaggtgaactacaccatctacgatggcttcaacctgcgcaacaccaacctggccgccaacttcaacggccagaacaccgagatcaacaacatgaacttcaccaagctgaagaacttcaccggcctgttcgagttctacaagctgctgtgcgtgcgcggcatcatcaccagcaagaccaagagcctggataagggctacaacaaggccctgaacgatctgtgcatcaaggtgaacaactgggatctgttcttcagccccagcgaggataacttcaccaacgatctgaacaagggcgaggagatcaccagcgataccaacatcgaggccgccgaggagaacatcagcctggatctgatccagcagtactacctgaccttcaacttcgataacgagcccgagaacatcagcatcgagaacctgagcagcgatatcatcggccagctggagctgatgcccaacatcgagcgcttccccaacggcaagaagtacgagctggataagtacaccatgttccactacctgcgcgcccaggagttcgagcacggcaagagccgcatcgccctgaccaacagcgtgaacgaggccctgctgaaccccagccgcgtgtacaccttcttcagcagcgattacgtgaagaaggtgaacaaggccaccgaggccgccatgttcctgggctgggtggagcagctggtgtacgatttcaccgatgagaccagcgaggtgagcaccaccgataagatcgccgatatcaccatcatcatcccctacatcggccccgccctgaacatcggcaacatgctgtacaaggatgatttcgtgggcgccctgatcttcagcggcgccgtgatcctgctggagttcatccccgagatcgccatccccgtgctgggcaccttcgccctggtgagctacatcgccaacaaggtgctgaccgtgcagaccatcgataacgccctgagcaagcgcaacgagaagtgggatgaggtgtacaagtacatcgtgaccaactggctggccaaggtgaacacccagatcgatctgatccgcaagaagatgaaggaggccctggagaaccaggccgaggccaccaaggccatcatcaactaccagtacaaccagtacaccgaggaggagaagaacaacatcaacttcaacatcgatgatctgagcagcaagctgaacgagagcatcaacaaggccatgatcaacatcaacaagttcctgaaccagtgcagcgtgagctacctgatgaacagcatgatcccctacggcgtgaagcgcctggaggatttcgatgccagcctgaaggatgccctgctgaagtacatctacgataaccgcggcaccctgatcggccaggtggatcgcctgaaggataaggtgaacaacaccctgagcaccgatatccccttccagctgagcaagtacgtggataaccagcgcctgctgagcaccttcaccgagtacatcaagaacatcatcaacaccagcatcctgaacctgcgctacgagagcaaccacctgatcgatctgagccgctacgccagcaagatcaacatcggcagcaaggtgaacttcgatcccatcgataagaaccagatccagctgttcaacctggagagcagcaagatcgaggtgatcctgaagaacgccatcgtgtacaacagcatgtacgagaacttcagcaccagcttctggatccgcatccccaagtacttcaacagcatcagcctgaacaacgagtacaccatcatcaactgcatggagaacaacagcggctggaaggtgagcctgaactacggcgagatcatctggaccctgcaggatacccaggagatcaagcagcgcgtggtgttcaagtacagccagatgatcaacatcagcgattacatcaaccgctggatcttcgtgaccatcaccaacaaccgcctgaacaacagcaagatctacatcaacggccgcctgatcgatcagaagcccatcagcaacctgggcaacatccacgccagcaacaacatcatgttcaagctggatggctgccgcgatacccaccgctacatctggatcaagtacttcaacctgttcgataaggagctgaacgagaaggagatcaaggatctgtacgataaccagagcaacagcggcatcctgaaggatttctggggcgattacctgcagtacgataagccctactacatgctgaacctgtacgatcccaacaagtacgtggatgtgaacaacgtgggcatccgcggctacatgtacctgaagggcccccgcggcagcgtgatgaccaccaacatctacctgaacagcagcctgtaccgcggcaccaagttcatcatcaagaagtacgccagcggcaacaaggataacatcgtgcgcaacaacgatcgcgtgtacatcaacgtggtggtgaagaacaaggagtaccgcctggccaccaacgccagccaggccggcgtggagaagatcctgagcgccctggagatccccgatgtgggcaacctgagccaggtggtggtgatgaagagcaagaacgatcagggcatcaccaacaagtgcaagatgaacctgcaggataacaacggcaacgatatcggcttcatcggcttccaccagttcaacaacatcgccaagctggtggccagcaactggtacaaccgccagatcgagcgcagcagccgcaccctgggctgcagctgggagttcatccccgtggatgatggctggggcgagcgccccctgtaa

SEQ ID NO: 60 - DNA, 3891 bp, Artificial Sequence
  BoNT/A,  D. melanogaster-modified 3
atgcctttcgtgaataaacagtttaactataaagatcccgttaacggtgtggacattgcttacattaaaatacccaacgccggtcagatgcaacctgttaaagccttcaagatccataataagatctgggtgattcccgagcgggacactttcacaaacccggaggaaggcgacctaaacccgccacccgaggctaaacaggtgccggttagctattacgatagcacatacctgagcactgacaacgaaaaggataactatctgaagggtgttacgaagttgttcgagcgcatttacagcactgacctgggccgcatgctgttgacatccatcgttcgaggtattccattttggggcggatccacgatagacactgagttgaaggtgatagatacgaattgcataaacgtcatccagcccgatggatcttaccgttctgaggaactgaacttggtgataatcggtccgtcggccgacatcattcagtttgaatgcaagagtttcggccatgaagtcctgaacctgactcgcaacggctatggctcaacacaatatattaggttctcgccggatttcaccttcggcttcgaggaatcgctggaggtcgataccaacccactgctaggcgccggtaagtttgcgaccgaccccgccgtgacccttgcgcacgagctgatccacgctggacacaggctatatggaatagctatcaacccgaaccgcgtgtttaaggtcaacaccaacgcgtactatgaaatgagtggattggaggtgagcttcgaagagctgcgcacatttggaggccatgacgccaagttcattgactccctacaagaaaatgagtttcgtctctactattacaataagtttaaggatatcgctagtacccttaataaggcaaaatccattgtgggaacgaccgcgtcgctgcagtatatgaagaacgtgttcaaggaaaaatatctgctctccgaagacacaagcggaaagtttagcgttgataaacttaagtttgataaactgtacaaaatgcttacagagatctacaccgaggataattttgtgaagttctttaaggtcctgaatagaaagacgtatttgaactttgataaggccgtgttcaagatcaatattgtgcccaaggtgaattatacaatttatgacggcttcaacctccggaataccaacctcgctgccaacttcaacggccagaataccgagattaacaatatgaacttcacgaagctgaagaattttactggactcttcgaattctataaactgctatgcgtgaggggcatcataacgagcaagaccaaaagcctggacaagggttacaataaagccttgaacgatttgtgtatcaaagtgaataactgggatctctttttctccccgtctgaagacaactttaccaatgatctgaacaagggcgaggaaataacttctgacacgaacatcgaagccgcagaggaaaacatttcccttgacctgatccagcaatactatttgacgtttaatttcgacaacgagccggagaacattagcatcgaaaacctgagttcggatatcataggccaactggaacttatgcccaatatcgagcgattcccgaatggcaaaaagtacgaactggataaatacactatgttccactatttgcgagctcaggagtttgagcacggcaagagccgtatcgccctgactaactcagtcaatgaggcgctcctgaacccatcaagagtgtatacatttttcagctctgattacgtgaaaaaggtgaacaaagcaactgaggcggcaatgttcctcggttgggtggaacaactggtgtacgatttcaccgacgagacgtcggaggtgtccacgaccgacaagattgccgacataaccatcattatcccctacattggacccgcactaaatatcggaaacatgctgtacaaggatgactttgtcggagcactgatcttttccggagccgtgatcctcctggaattcattcctgagattgccattccagtgctcggcacatttgccctggtgagctacatcgccaataaggtgctgacggtccaaaccatagataacgcgcttagtaagcgaaatgagaaatgggatgaggtctacaaatatatcgtgacaaattggctggccaaggtgaacacccagattgacctgatccgaaagaaaatgaaggaagccctggaaaatcaagctgaggcaacgaaggctatcattaattatcagtacaatcaatacaccgaggaagagaaaaacaatattaacttcaacatagacgatctctcgagtaagttgaatgagagtattaacaaagcgatgatcaatataaataaattcctgaaccagtgcagcgtctcctacttgatgaattccatgataccctatggcgtcaagcgcctggaggatttcgatgcaagcctgaaggacgcgctgctcaagtacatttacgataatcgcggcaccttgatcggccaggtggaccgcctgaaggataaggtgaataacacgctgagtaccgacattcccttccagttgtcaaagtacgtggataaccagcgactcctttcgaccttcacggagtatatcaagaatatcattaataccagtatactgaacctgcggtatgagtccaaccacctaattgatctgtcgaggtatgctagtaagattaacattggcagcaaggtcaattttgatccgatagataaaaaccagatccagctgttcaacctggagtccagcaagatcgaggttatactgaagaacgccatcgtgtacaactccatgtatgagaacttcagcacctccttctggataagaatccccaagtacttcaattcgatctcgctgaacaatgagtacacgataatcaactgtatggagaacaattcgggctggaaagtttcactcaattacggtgagatcatttggactctgcaggacactcaggagatcaagcagcgcgttgtgtttaagtattctcagatgatcaacatctcggattacatcaatcggtggatcttcgtgaccatcacgaacaatcggctgaataactcgaagatctatattaacggtcgcctgatcgaccagaaaccaatcagtaacttgggaaacatacacgccagcaataacatcatgtttaagctcgatggttgtcgcgacacccatcgttacatctggattaaatacttcaatcttttcgataaggagcttaatgagaaggagattaaggatttgtacgataatcagtccaattcaggaattctgaaggatttctggggcgactaccttcagtacgacaaaccatactatatgctaaatctatacgacccgaacaagtacgttgacgtgaacaatgtcggtattcgcggctacatgtacttgaagggccctcgtggctcggtcatgaccacgaatatttacctcaactcgtcattgtaccgcggaacaaaattcataatcaagaaatacgcctcaggaaacaaggataacatagttaggaataacgaccgtgtctacatcaacgtggtcgtgaagaacaaggagtaccgcttggccacaaatgcaagccaggccggcgtggagaagatactgtccgccctagagatcccagacgtcggtaacctctcccaggtggttgtgatgaagtccaagaacgatcagggcattaccaataagtgcaagatgaatctgcaagataataacggcaacgacatcggcttcattggattccatcaatttaataacatcgctaagttggtggcgtctaattggtacaatcgtcaaatcgaaagatccagccggacactgggctgctcgtgggagttcattcctgttgacgatggctggggtgagcgaccactctaa

SEQ ID NO: 61 - DNA, 3891 bp, Artificial Sequence
  BoNT/A,  S. frugiperda-modified 1
atgcctttcgttaacaagcaatttaactacaaggacccggtcaatggagttgacattgcttacatcaaaattcccaacgctgggcagatgcagcctgttaaggcgttcaaaatccacaataagatatgggtgatcccagaacgcgatacgttcactaaccccgaggaaggcgacttgaacccgccacctgaagcgaaacaagttccagtgagctattacgactccacatacttgtctacggataacgagaaagataactatctgaagggcgttactaagctcttcgaaaggatttattccactgacctcggtcgcatgctgctcacaagcattgtgcgcggtatccctttctggggtggatccacgatcgataccgagctcaaggtgatcgataccaactgtatcaacgttattcagcccgacggctcctatcgtagtgaggaactgaatttggtcatcattggcccctcggctgatattatccaattcgaatgtaagtcgttcgggcacgaggtcttaaacctcacgcgtaatggttacggttccacgcagtacattcgattctcgcccgacttcacttttggctttgaagagtcgttggaggtggacactaaccccttgctgggtgccggtaaattcgcgacggaccccgctgtaacgctcgcgcacgagctaatccatgcaggacataggctttacggaatcgcgatcaaccccaaccgtgtatttaaagttaacaccaacgcctactatgaaatgtccggacttgaggtcagctttgaggaactcaggacctttggcgggcacgacgcaaagttcatcgactcactgcaagaaaatgagttcagactgtactattacaacaagttcaaggatatcgcttctacccttaacaaggcgaagagcatcgtcggaactaccgcctctctccaatacatgaagaacgtcttcaaggagaaatacctgttatcagaggacacaagtggcaagttctcagtggacaagttaaagttcgacaaactgtacaaaatgttgactgaaatctacaccgaagataatttcgtgaagttctttaaggttttgaaccgcaagacatacttgaactttgataaggcagtgttcaagataaacatcgtacctaaggtcaactacacaatttacgacggtttcaaccttcgtaacacaaatctcgcggccaactttaacggtcaaaacacagagatcaataacatgaactttaccaaactaaagaatttcaccggtcttttcgagttctacaaattgctatgcgtacgtggaataatcacgtccaagactaagtcacttgataagggttataataaggctttgaacgacctgtgcatcaaagttaacaattgggacttattcttttctccatcagaggataacttcacaaacgaccttaacaagggtgaagagatcacttctgacaccaatatcgaagcagctgaggaaaacatttccctggatctgatccagcaatactatttaaccttcaacttcgataacgagcctgagaacatctcgattgaaaatctcagtagcgatatcattggccaactcgaacttatgccaaacattgagaggttcccaaacggcaagaaatacgagttggacaagtacactatgttccattacttgcgggcgcaagaattcgaacacggcaaatcccgaatcgccctaactaatagcgtcaatgaggcactcttgaacccctcacgtgtctacacattcttttcttcagactacgtgaagaaagtgaataaggccacggaggccgcgatgtttcttggttgggttgagcaactcgtatacgacttcactgacgagacttccgaggtgtctactaccgacaaaatcgctgacatcaccatcattatcccttacataggtccagcactgaacattggaaacatgctgtataaggatgactttgttggtgctttgattttctctggtgctgtgatcctgttagagttcatccccgagatcgccatccctgtgctaggaaccttcgccctggtgagctacattgctaacaaggtgctgacagtccagacaatcgataacgccttgtcgaagaggaacgagaagtgggacgaggtctacaaatatattgtgacaaattggttggcgaaggtgaatacacagatcgacttgattcggaaaaagatgaaggaagccctggagaaccaggctgaagctacaaaggccatcattaactaccagtataaccaatacacggaggaagagaaaaacaatataaattttaacatcgatgacctaagtagcaagttaaatgagtccatcaacaaagccatgattaacatcaataaattcctgaaccagtgctcggtcagctatctgatgaatagtatgatcccctatggtgttaaaagattagaagacttcgatgcaagtcttaaggatgccttgcttaagtacatctacgacaaccgcggcacgttgatcggtcaagtcgatcgtctgaaggacaaggttaacaataccctctccaccgatataccttttcagctctcgaagtatgtagacaaccagagactcctgtcaacttttaccgagtatataaagaacatcattaacacctcgatcctgaatcttcgttacgaatccaatcacctgattgacctttcccgctacgcttcgaagataaacataggcagcaaagtaaactttgacccgatcgacaagaaccaaattcagctcttcaatctggagagcagtaagatcgaggtgatcctgaagaacgcaatcgtgtataacagtatgtacgagaacttctctacctccttctggattcgtatcccaaagtacttcaattcaatcagcctgaacaatgagtacaccatcataaactgtatggaaaacaattctggatggaaagtaagcctaaactacggtgaaattatctggacactgcaggacactcaggagattaagcagagggtcgtattcaagtactctcagatgattaacatatccgattacatcaaccgatggatattcgtgaccattaccaacaatcgactaaacaattccaagatatacattaacggacgcctgatcgaccaaaaaccgatctcaaacctcggaaacattcacgcttctaacaatataatgttcaaattggacggctgcagagacactcatagatatatttggatcaaatacttcaacctgttcgacaaggaattgaatgaaaaagagattaaggatctctacgataatcagtctaactccggaatcctgaaggatttctggggtgattatctccagtacgacaagccttactatatgctaaacttgtacgacccgaacaagtacgtggacgtgaacaatgtgggcatccgcggttacatgtacctgaaaggacctcgtggttcagtcatgaccactaacatctacctgaactctagtctgtaccgcggcaccaagttcatcattaaaaagtacgctagcggaaacaaagataatatcgtgcgcaacaatgacagggtctacatcaacgtcgttgtcaaaaacaaggagtacaggctcgctactaacgcttcacaggccggagtggagaagatcctcagcgccctcgaaatccccgacgtgggcaacctgagtcaggtcgtagtcatgaagtcaaagaatgaccagggcatcaccaacaagtgcaagatgaaccttcaggacaacaatggcaacgatattggcttcatcggattccaccaattcaacaacatcgcaaagctcgtagcttccaactggtacaacaggcagatcgagagatcttcccgtaccctgggctgctcttgggaattcatcccggtcgacgatggatggggtgaaagaccactctaa

SEQ ID NO: 62 - DNA, 3891 bp, Artificial Sequence
  BoNT/A,  S. frugiperda-modified 2
atgcccttcgtgaacaagcagttcaactacaaggaccccgtgaacggtgtggacatcgcttacatcaagatccccaacgctggtcagatgcagcccgtgaaggctttcaagatccacaacaagatctgggtgatccccgagcgtgacaccttcaccaaccccgaggagggtgacctgaaccccccccccgaggctaagcaggtgcccgtgtcctactacgactccacctacctgtccaccgacaacgagaaggacaactacctgaagggtgtgaccaagctgttcgagcgtatctactccaccgacctgggtcgtatgctgctgacctccatcgtgcgtggtatccccttctggggtggttccaccatcgacaccgagctgaaggtgatcgacaccaactgcatcaacgtgatccagcccgacggttcctaccgttccgaggagctgaacctggtgatcatcggtccctccgctgacatcatccagttcgagtgcaagtccttcggtcacgaggtgctgaacctgacccgtaacggttacggttccacccagtacatccgtttctcccccgacttcaccttcggtttcgaggagtccctggaggtggacaccaaccccctgctgggtgctggtaagttcgctaccgaccccgctgtgaccctggctcacgagctgatccacgctggtcaccgtctgtacggtatcgctatcaaccccaaccgtgtgttcaaggtgaacaccaacgcttactacgagatgtccggtctggaggtgtccttcgaggagctgcgtaccttcggtggtcacgacgctaagttcatcgactccctgcaggagaacgagttccgtctgtactactacaacaagttcaaggacatcgcttccaccctgaacaaggctaagtccatcgtgggtaccaccgcttccctgcagtacatgaagaacgtgttcaaggagaagtacctgctgtccgaggacacctccggtaagttctccgtggacaagctgaagttcgacaagctgtacaagatgctgaccgagatctacaccgaggacaacttcgtgaagttcttcaaggtgctgaaccgtaagacctacctgaacttcgacaaggctgtgttcaagatcaacatcgtgcccaaggtgaactacaccatctacgacggtttcaacctgcgtaacaccaacctggctgctaacttcaacggtcagaacaccgagatcaacaacatgaacttcaccaagctgaagaacttcaccggtctgttcgagttctacaagctgctgtgcgtgcgtggtatcatcacctccaagaccaagtccctggacaagggttacaacaaggctctgaacgacctgtgcatcaaggtgaacaactgggacctgttcttctccccctccgaggacaacttcaccaacgacctgaacaagggtgaggagatcacctccgacaccaacatcgaggctgctgaggagaacatctccctggacctgatccagcagtactacctgaccttcaacttcgacaacgagcccgagaacatctccatcgagaacctgtcctccgacatcatcggtcagctggagctgatgcccaacatcgagcgtttccccaacggtaagaagtacgagctggacaagtacaccatgttccactacctgcgtgctcaggagttcgagcacggtaagtcccgtatcgctctgaccaactccgtgaacgaggctctgctgaacccctcccgtgtgtacaccttcttctcctccgactacgtgaagaaggtgaacaaggctaccgaggctgctatgttcctgggttgggtggagcagctggtgtacgacttcaccgacgagacctccgaggtgtccaccaccgacaagatcgctgacatcaccatcatcatcccctacatcggtcccgctctgaacatcggtaacatgctgtacaaggacgacttcgtgggtgctctgatcttctccggtgctgtgatcctgctggagttcatccccgagatcgctatccccgtgctgggtaccttcgctctggtgtcctacatcgctaacaaggtgctgaccgtgcagaccatcgacaacgctctgtccaagcgtaacgagaagtgggacgaggtgtacaagtacatcgtgaccaactggctggctaaggtgaacacccagatcgacctgatccgtaagaagatgaaggaggctctggagaaccaggctgaggctaccaaggctatcatcaactaccagtacaaccagtacaccgaggaggagaagaacaacatcaacttcaacatcgacgacctgtcctccaagctgaacgagtccatcaacaaggctatgatcaacatcaacaagttcctgaaccagtgctccgtgtcctacctgatgaactccatgatcccctacggtgtgaagcgtctggaggacttcgacgcttccctgaaggacgctctgctgaagtacatctacgacaaccgtggtaccctgatcggtcaggtggaccgtctgaaggacaaggtgaacaacaccctgtccaccgacatccccttccagctgtccaagtacgtggacaaccagcgtctgctgtccaccttcaccgagtacatcaagaacatcatcaacacctccatcctgaacctgcgttacgagtccaaccacctgatcgacctgtcccgttacgcttccaagatcaacatcggttccaaggtgaacttcgaccccatcgacaagaaccagatccagctgttcaacctggagtcctccaagatcgaggtgatcctgaagaacgctatcgtgtacaactccatgtacgagaacttctccacctccttctggatccgtatccccaagtacttcaactccatctccctgaacaacgagtacaccatcatcaactgcatggagaacaactccggttggaaggtgtccctgaactacggtgagatcatctggaccctgcaggacacccaggagatcaagcagcgtgtggtgttcaagtactcccagatgatcaacatctccgactacatcaaccgttggatcttcgtgaccatcaccaacaaccgtctgaacaactccaagatctacatcaacggtcgtctgatcgaccagaagcccatctccaacctgggtaacatccacgcttccaacaacatcatgttcaagctggacggttgccgtgacacccaccgttacatctggatcaagtacttcaacctgttcgacaaggagctgaacgagaaggagatcaaggacctgtacgacaaccagtccaactccggtatcctgaaggacttctggggtgactacctgcagtacgacaagccctactacatgctgaacctgtacgaccccaacaagtacgtggacgtgaacaacgtgggtatccgtggttacatgtacctgaagggtccccgtggttccgtgatgaccaccaacatctacctgaactcctccctgtaccgtggtaccaagttcatcatcaagaagtacgcttccggtaacaaggacaacatcgtgcgtaacaacgaccgtgtgtacatcaacgtggtggtgaagaacaaggagtaccgtctggctaccaacgcttcccaggctggtgtggagaagatcctgtccgctctggagatccccgacgtgggtaacctgtcccaggtggtggtgatgaagtccaagaacgaccagggtatcaccaacaagtgcaagatgaacctgcaggacaacaacggtaacgacatcggtttcatcggtttccaccagttcaacaacatcgctaagctggtggcttccaactggtacaaccgtcagatcgagcgttcctcccgtaccctgggttgctcctgggagttcatccccgtggacgacggttggggtgagcgtcccctgtaa

SEQ ID NO: 63 - DNA, 3891 bp, Artificial Sequence
  BoNT/A,  S. frugiperda-modified 3
atgccgttcgtaaataagcaatttaattataaagaccctgtgaatggagtggatatcgcttacattaagatcccaaatgctggtcaaatgcagcccgtcaaggcatttaagatccataataaaatttgggtcatcccagagagggacactttcaccaatcctgaggaaggagaccttaaccccccgcctgaggctaaacaggtcccagtgtcttattacgatagtacatacctgtccacggacaacgagaaagacaattatctcaaaggagtaactaaactctttgaaagaatttattccaccgacctcggaaggatgctgttgacatcgatcgtacgcggcatccccttctggggaggctctacgatcgataccgaattgaaagttatcgacactaactgcatcaacgttattcaaccggatggaagctacaggtccgaggaactgaacctcgtgatcattggaccttctgctgacatcattcaatttgaatgcaagagcttcggtcacgaagttctgaatctgactaggaatggctacggtagtacgcagtatattcgtttctccccagacttcacattcggtttcgaggaatcacttgaggttgacaccaaccccttgctcggtgccggtaagtttgctacagatcccgcggtcacattggcacatgagctgattcatgcgggtcaccgcctgtacggtattgccatcaatcccaaccgtgtcttcaaggtgaacactaatgcctactatgagatgtcaggtctcgaagtctcttttgaagagctgcgcacctttggcggacatgatgcaaagtttatcgactctttgcaagagaacgaattccgcctctactattacaataagtttaaggacattgctagcacactgaacaaggcgaaatctatcgtcggaaccactgcgagtttgcaatacatgaaaaacgtcttcaaagaaaagtacctcctgtccgaggatacctccggcaagttcagcgtggacaagttgaagttcgataagctctataaaatgctgaccgaaatctacactgaggacaacttcgtgaaattctttaaggtcctgaataggaagacctacctgaatttcgacaaagcggtgtttaagatcaacatcgtccctaaggtaaactacactatctacgacggtttcaatctccgtaacacgaacctggccgctaacttcaacggacaaaacaccgaaatcaacaatatgaacttcacaaaattgaagaacttcaccggtttgttcgaattctacaagctcctgtgcgtgaggggcatcattacctcgaagacaaagagcctggacaaaggctacaacaaagccctgaacgacctgtgcattaaggtgaataactgggaccttttctttagtccatctgaagataacttcacaaacgatctcaataagggagaagagatcacctccgataccaacatcgaggcggcagaggaaaacatttcactggatctgatccagcaatactatctcaccttcaacttcgacaatgaacctgagaacatcagtatcgagaatttgagctccgacatcattggccagctggaattgatgcctaacatcgaacgtttccccaacggcaaaaagtacgagttggacaaatacacaatgttccactaccttagagcccaggagttcgagcacggcaagagccgcatcgcccttacgaactccgtcaacgaggccctgctcaacccgtctcgcgtgtacacgttcttttcctcggattacgttaagaaagtgaataaagctactgaggctgccatgttcctgggatgggtagagcagcttgtctacgatttcaccgatgagacaagcgaggtttctaccacagataaaatcgctgacattactatcattatcccgtacatcggtcctgcactgaacatcggtaacatgctctataaggacgatttcgtgggtgctctgatcttttctggcgctgtgatcctgcttgagttcatccccgaaatcgctatccccgtgcttggtactttcgctcttgtctcttacatcgctaacaaggtattgactgtccagaccatcgacaatgcactgtccaagcgtaacgaaaaatgggacgaggtgtacaagtacattgttactaactggctcgccaaagtgaacacccaaatcgatctgatccgtaagaaaatgaaggaggctctggaaaaccaggccgaagcgactaaggccatcattaactaccaatacaaccagtatacagaagaggaaaagaataacattaatttcaacatcgatgacctctcgtcaaagctcaatgagtctatcaacaaggcgatgatcaacattaacaagttcttgaaccagtgcagtgtctcctatttgatgaattcgatgatcccatacggtgtgaagaggctggaggacttcgacgcctctctgaaagatgcgcttctgaagtacatctacgacaatcgtggtacgcttatcggccaggtagaccgcctcaaggacaaggttaacaataccctgtcgaccgatatccctttccagctgtcaaagtacgtggacaaccagcgtctgctcagcaccttcaccgagtacattaagaacatcattaatacgtccattctcaacctgagatacgaaagcaaccacttgatcgatctttcgcgctacgcatctaagatcaacatcggtagcaaagtaaatttcgatcctatcgataagaaccagattcaactgttcaacttggagtcaagcaaaatcgaagttattctgaaaaacgcgatcgtttataacagtatgtatgagaacttctccacgagtttctggatcaggatccccaagtatttcaactcaatcagcctgaacaatgagtacactatcattaactgcatggagaacaattcaggctggaaggtctccctgaactacggagagatcatttggacgttgcaggacacgcaagaaattaagcagcgtgttgtgttcaaatatagccaaatgatcaacatctctgactacatcaaccgttggatctttgtcactatcacaaacaatcgtctgaacaatagtaagatctacatcaacggcagactcatcgaccagaagcccatctcgaatctgggaaacattcacgcctcaaataacattatgttcaaacttgacggttgtcgtgacacacaccgttatatctggatcaagtattttaacctcttcgataaggagttgaatgaaaaggagatcaaggacttgtacgacaaccagtcgaactccggtatcctgaaggacttctggggagattacctgcagtacgacaagccgtactatatgctgaacctgtacgacccaaacaagtacgttgacgtaaacaatgttggaattcgcggctacatgtacttgaagggaccaagaggttccgtgatgactaccaacatttacctgaattccagcctgtacaggggcaccaagtttattatcaagaaatacgcatccggcaacaaggacaacatcgtgagaaacaatgatcgcgtctacatcaacgtcgtggtaaagaacaaggagtaccgtctggcaactaacgcttcacaggctggtgtggaaaagatcctctcggccctggagatccccgacgttggcaacctgtcacaagtggtcgtaatgaaatcaaagaacgaccagggtattactaacaagtgtaagatgaacctccaagataacaacggtaacgatatcggcttcatcggcttccaccagttcaacaacattgctaagcttgtggcctctaactggtacaacagacagatcgagcgttcctcacgtaccttgggttgtagttgggagtttatccctgtcgacgacggatggggtgagcgtccactgtaa

SEQ ID NO: 64 - DNA, 3891 bp, Artificial Sequence
  BoNT/A,  D. rerio-modified 1
atgccgttcgttaataaacagttcaactacaaggacccagtgaatggagtggacatcgcatacatcaagatcccgaacgccgggcagatgcagcccgtaaaggcatttaaaatccacaataagatctgggttataccagaaagagatacatttactaacccagaggaaggagacctgaaccctcccccagaggcaaaacaggtgcccgtgagctattacgactctacctatctgtcgacagacaatgagaaagataactacctgaagggggtcaccaaactgttcgagcgcatttactcaacagacctgggccgaatgcttctgacaagtatcgtgaggggaatacctttttggggaggttctacaatcgacactgagctcaaagtaatcgacacaaactgcattaacgtgatccagccggatggctcttatcgaagtgaggaactgaatctggtcatcattggtccaagtgccgatatcattcagttcgagtgtaagtcttttggtcatgaggttttgaatctcacacggaacgggtacggttcaacccagtacatcagattctctcccgatttcacctttggcttcgaggaatccctggaggtcgacactaatcctctgcttggagcagggaaattcgctacggaccctgcagtgacattggctcacgagctcatccatgctggccatcgcctttacggaattgccattaatccaaaccgggtttttaaagtgaatacgaacgcctattacgagatgtccggactagaggtgtcctttgaggaactcaggacatttgggggtcacgatgctaaatttatcgactccctgcaggaaaacgaattcaggctgtattactataacaaattcaaagatatcgcctcgacgctgaacaaggccaaatctattgtcggcaccactgcatctctgcaatatatgaaaaacgtcttcaaggaaaagtacctcctgagtgaggacaccagcggaaagttctctgtcgataaattgaagtttgataagttgtacaagatgctgactgagatctatactgaggacaatttcgtcaaattctttaaagtgttaaaccgaaagacatatctgaacttcgacaaagcggtttttaagattaacattgtgcctaaggtgaactatactatatatgatggctttaatctgaggaacacaaaccttgcggctaactttaacggccaaaatacagagattaacaatatgaactttacaaaactcaagaactttaccggattattcgagttctacaaattgctttgtgttcgcgggattatcacgagtaagactaaaagcctcgataagggatataataaagccctgaacgacctctgtatcaaagttaataactgggatctgtttttcagcccaagcgaggataacttcacgaacgacctgaataagggagaggaaattaccagcgacacaaatatcgaggcggccgaggaaaacatatccctggacttgattcagcaatactatttaaccttcaacttcgataacgaaccggagaacatctccatagaaaatctgtctagtgacatcattggacagctggaactgatgcctaacattgagcggtttcccaatggcaaaaagtacgagctcgataagtacactatgtttcactatctgcgtgcacaggaattcgaacacggtaaaagcaggattgcactcaccaactctgtcaacgaggccttacttaacccttctcgcgtttacactttctttagctcagactatgtgaagaaagttaacaaggccactgaggctgccatgtttttggggtgggtcgagcaactggtgtacgattttaccgacgaaacatcagaggtcagtacgactgataagatcgcggatataactataatcattccatatataggtcctgctctcaacatcggtaacatgttatacaaagatgacttcgtgggtgcgcttattttctcaggcgcggtcatcctgctcgaattcattccagagattgctatccccgtgctgggaacttttgctctggtgtcttacatcgccaacaaggtgcttaccgtgcaaactatcgataacgccttgtccaagcggaatgagaaatgggacgaggtgtacaagtacatcgtaacaaattggctagccaaagtcaatacccaaatcgatttgatcagaaagaaaatgaaagaggcactagagaaccaggctgaagcaacaaaggcaatcattaattatcagtacaatcagtacaccgaggaagagaaaaacaatattaatttcaatatcgatgacttgtctagcaagctaaacgagtcaatcaataaagctatgattaatatcaataaattcctgaaccagtgctctgtttcttaccttatgaattcgatgataccttatggtgtgaagagactggaggactttgacgcatcgctgaaagatgcactcttgaagtacatctacgataacagaggaactctcatagggcaggtggacaggttgaaggacaaggttaacaataccctgagtaccgacatccccttccagctaagcaagtacgtggataaccaaaggctgctttcaacattcaccgaatacattaagaatatcattaacacaagcatcctcaatctaaggtatgagtcaaatcatctcatagacttatcccgttatgcctcgaaaattaatattggatccaaagtgaactttgaccctatcgataagaaccaaatacaactttttaacctggagtctagcaagattgaggtcattcttaagaatgctatcgtgtacaactctatgtacgagaacttcagcactagtttctggatccgcatcccgaagtatttcaactcaatttccttaaacaatgagtataccatcattaactgcatggaaaacaatagtggctggaaagttagcctcaattatggtgaaataatctggaccttgcaggacacacaggagattaaacagagagtggtttttaagtacagtcagatgatcaacatctccgactacattaacagatggatctttgttacgattacgaacaatcgactcaataactccaagatttacataaatggacgcctgattgatcagaaaccaatctccaacctgggtaacatccatgccagtaacaatatcatgttcaaactagatggatgccgtgacacgcaccgttacatctggatcaaatactttaacttgtttgataaagagctgaacgagaaggaaattaaagatctttatgataatcaatcaaactccggcatcctcaaggatttttggggcgattaccttcagtacgataagccttactatatgctgaacctgtacgaccccaataagtatgtggacgtcaataacgtggggatccgaggatatatgtatctcaaaggtccccgcggatccgttatgaccactaacatatacctgaatagctcgctgtatagaggcacaaagttcataatcaagaaatatgctagcggcaataaagacaacatagtacgtaacaatgacagagtgtacataaacgtcgtagtcaaaaataaggagtaccggctggctacgaacgcttcacaggccggcgtagaaaaaatcctttcagctctggaaattcctgacgtaggtaacttaagccaggtcgtggttatgaagtcaaagaacgatcaggggatcaccaataagtgtaaaatgaatctgcaggataacaatggcaatgacatcggattcattggctttcaccagttcaacaacatcgcgaaactggtggctagcaactggtataacagacagatcgaacgtagctccagaacattgggctgcagttgggaattcattccggtggacgacggatggggagagcgcccactctaa

SEQ ID NO: 65 - DNA, 3891 bp, Artificial Sequence
  BoNT/A,  D. rerio-modified 2
atgcctttcgtgaacaagcagttcaactacaaggaccctgtgaacggagtggacatcgcttacatcaagatccctaacgctggacagatgcagcctgtgaaggctttcaagatccacaacaagatctgggtgatccctgagagagacacattcacaaaccctgaggagggagacctgaaccctcctcctgaggctaagcaggtgcctgtgagctactacgacagcacatacctgagcacagacaacgagaaggacaactacctgaagggagtgacaaagctgttcgagagaatctacagcacagacctgggaagaatgctgctgacaagcatcgtgagaggaatccctttctggggaggaagcacaatcgacacagagctgaaggtgatcgacacaaactgcatcaacgtgatccagcctgacggaagctacagaagcgaggagctgaacctggtgatcatcggacctagcgctgacatcatccagttcgagtgcaagagcttcggacacgaggtgctgaacctgacaagaaacggatacggaagcacacagtacatcagattcagccctgacttcacattcggattcgaggagagcctggaggtggacacaaaccctctgctgggagctggaaagttcgctacagaccctgctgtgacactggctcacgagctgatccacgctggacacagactgtacggaatcgctatcaaccctaacagagtgttcaaggtgaacacaaacgcttactacgagatgagcggactggaggtgagcttcgaggagctgagaacattcggaggacacgacgctaagttcatcgacagcctgcaggagaacgagttcagactgtactactacaacaagttcaaggacatcgctagcacactgaacaaggctaagagcatcgtgggaacaacagctagcctgcagtacatgaagaacgtgttcaaggagaagtacctgctgagcgaggacacaagcggaaagttcagcgtggacaagctgaagttcgacaagctgtacaagatgctgacagagatctacacagaggacaacttcgtgaagttcttcaaggtgctgaacagaaagacatacctgaacttcgacaaggctgtgttcaagatcaacatcgtgcctaaggtgaactacacaatctacgacggattcaacctgagaaacacaaacctggctgctaacttcaacggacagaacacagagatcaacaacatgaacttcacaaagctgaagaacttcacaggactgttcgagttctacaagctgctgtgcgtgagaggaatcatcacaagcaagacaaagagcctggacaagggatacaacaaggctctgaacgacctgtgcatcaaggtgaacaactgggacctgttcttcagccctagcgaggacaacttcacaaacgacctgaacaagggagaggagatcacaagcgacacaaacatcgaggctgctgaggagaacatcagcctggacctgatccagcagtactacctgacattcaacttcgacaacgagcctgagaacatcagcatcgagaacctgagcagcgacatcatcggacagctggagctgatgcctaacatcgagagattccctaacggaaagaagtacgagctggacaagtacacaatgttccactacctgagagctcaggagttcgagcacggaaagagcagaatcgctctgacaaacagcgtgaacgaggctctgctgaaccctagcagagtgtacacattcttcagcagcgactacgtgaagaaggtgaacaaggctacagaggctgctatgttcctgggatgggtggagcagctggtgtacgacttcacagacgagacaagcgaggtgagcacaacagacaagatcgctgacatcacaatcatcatcccttacatcggacctgctctgaacatcggaaacatgctgtacaaggacgacttcgtgggagctctgatcttcagcggagctgtgatcctgctggagttcatccctgagatcgctatccctgtgctgggaacattcgctctggtgagctacatcgctaacaaggtgctgacagtgcagacaatcgacaacgctctgagcaagagaaacgagaagtgggacgaggtgtacaagtacatcgtgacaaactggctggctaaggtgaacacacagatcgacctgatcagaaagaagatgaaggaggctctggagaaccaggctgaggctacaaaggctatcatcaactaccagtacaaccagtacacagaggaggagaagaacaacatcaacttcaacatcgacgacctgagcagcaagctgaacgagagcatcaacaaggctatgatcaacatcaacaagttcctgaaccagtgcagcgtgagctacctgatgaacagcatgatcccttacggagtgaagagactggaggacttcgacgctagcctgaaggacgctctgctgaagtacatctacgacaacagaggaacactgatcggacaggtggacagactgaaggacaaggtgaacaacacactgagcacagacatccctttccagctgagcaagtacgtggacaaccagagactgctgagcacattcacagagtacatcaagaacatcatcaacacaagcatcctgaacctgagatacgagagcaaccacctgatcgacctgagcagatacgctagcaagatcaacatcggaagcaaggtgaacttcgaccctatcgacaagaaccagatccagctgttcaacctggagagcagcaagatcgaggtgatcctgaagaacgctatcgtgtacaacagcatgtacgagaacttcagcacaagcttctggatcagaatccctaagtacttcaacagcatcagcctgaacaacgagtacacaatcatcaactgcatggagaacaacagcggatggaaggtgagcctgaactacggagagatcatctggacactgcaggacacacaggagatcaagcagagagtggtgttcaagtacagccagatgatcaacatcagcgactacatcaacagatggatcttcgtgacaatcacaaacaacagactgaacaacagcaagatctacatcaacggaagactgatcgaccagaagcctatcagcaacctgggaaacatccacgctagcaacaacatcatgttcaagctggacggatgcagagacacacacagatacatctggatcaagtacttcaacctgttcgacaaggagctgaacgagaaggagatcaaggacctgtacgacaaccagagcaacagcggaatcctgaaggacttctggggagactacctgcagtacgacaagccttactacatgctgaacctgtacgaccctaacaagtacgtggacgtgaacaacgtgggaatcagaggatacatgtacctgaagggacctagaggaagcgtgatgacaacaaacatctacctgaacagcagcctgtacagaggaacaaagttcatcatcaagaagtacgctagcggaaacaaggacaacatcgtgagaaacaacgacagagtgtacatcaacgtggtggtgaagaacaaggagtacagactggctacaaacgctagccaggctggagtggagaagatcctgagcgctctggagatccctgacgtgggaaacctgagccaggtggtggtgatgaagagcaagaacgaccagggaatcacaaacaagtgcaagatgaacctgcaggacaacaacggaaacgacatcggattcatcggattccaccagttcaacaacatcgctaagctggtggctagcaactggtacaacagacagatcgagagaagcagcagaacactgggatgcagctgggagttcatccctgtggacgacggatggggagagagacctctgtaa

SEQ ID NO: 66 - DNA, 3891 bp, Artificial Sequence
  BoNT/A,  D. rerio-modified 3
atgccgtttgtcaacaagcaattcaattataaggatccagtcaatggagtggatatcgcttatatcaaaatccctaatgcgggtcagatgcagcccgtcaaagcgttcaaaatccacaacaagatctgggttatccctgagcgagacaccttcaccaacccagaagagggggacctgaatcccccacctgaagcgaaacaggtgcctgtgagctactatgacagcacctacctgtcaaccgataacgagaaagacaattatctgaaaggcgtgacaaaactgttcgaacgcatttatagcacagaccttggaaggatgctgctcactagcatcgttcgtggcattcccttttgggggggcagcaccatcgacactgaactgaaagtcatcgatacaaactgcatcaacgtcattcagccagatggatcatatcgaagcgaggaactcaatctggttattatcggtccatcagccgacatcattcagttcgagtgtaaatctttcggccacgaggtgctgaaccttactcgcaacggatatgggagtacacagtacatccgcttcagtccagacttcacatttggtttcgaagagagtcttgaggtggacaccaatcccctgctcggtgccggaaaattcgctacggatccagcagtcaccctggcccacgaactgattcacgctggacatagattgtacggaatcgcaatcaacccaaatagagttttcaaagtgaacactaatgcttactatgagatgagcggcctcgaggtctcatttgaggaattgaggacctttggcggtcatgatgcgaagttcattgactccctccaggaaaacgaatttcgtctttactattacaacaagttcaaggatatcgcttctaccttgaataaagccaagtctatcgtgggaacaacggcatccctccagtacatgaagaacgtgttcaaggagaagtatctgttgtcagaggacaccagcgggaaatttagcgttgataaactgaagttcgacaagctgtacaaaatgctgacagaaatctacacagaggacaatttcgtgaagtttttcaaggtgcttaacaggaagacctatctgaactttgacaaggcagtctttaaaatcaacattgttcctaaggttaactacaccatctatgatgggtttaacctcagaaacactaaccttgcagctaactttaatggacagaacactgagatcaacaatatgaactttacaaaacttaagaatttcacaggtctgttcgagttttataagctgctctgcgtccgtgggattatcacgagtaagacaaagtccctggacaagggatacaataaggctttgaacgatctgtgcattaaggtgaacaattgggatttgttctttagcccgagtgaagataatttcactaacgacctgaataaaggtgaggaaatcacaagcgacactaatattgaggcagctgaagagaacatctcactcgacttgatccaacagtactatcttacttttaatttcgacaatgaaccggagaatatctccattgagaatctcagctctgacattatcgggcaactggagctgatgccgaacatcgaacggtttcccaatggcaaaaagtatgaactcgataagtacactatgtttcactacctccgagcccaggaatttgaacatgggaagagcaggatcgcacttaccaacagcgtcaacgaggctctgcttaacccaagccgcgtgtacacatttttctcctcagattacgtcaagaaagttaacaaggccactgaggccgctatgttcctcggatgggttgaacagctggtttacgattttacggatgaaacgagcgaggtgtctactacagacaaaatcgctgatatcactatcattatcccgtacattggccctgcactcaacatcggaaacatgctgtacaaggacgatttcgtgggcgccctgatcttttctggagcagtgattctgcttgagttcatccctgagatcgccattcctgtgctgggaacgttcgccctcgtgtcttacatcgctaataaggtgctgacagtgcaaacaatcgataacgccctgtccaaaagaaacgagaaatgggatgaggtgtacaaatacatcgtcacaaactggttggctaaagttaacacacaaattgacctcatccggaagaaaatgaaagaggcgctggagaaccaggcggaagccaccaaagccatcattaattaccagtacaaccagtatacggaggaagagaaaaacaatattaattttaacatcgatgacctgagttctaagctcaatgagagtatcaacaaagcaatgattaacatcaataagttccttaaccagtgctctgtcagctacctgatgaattccatgatcccttatggggtgaagcgactggaggattttgacgcctctctgaaagatgctctgttgaagtatatttacgacaacaggggtacactcatcggccaggttgatcgcctgaaggataaggtcaataacaccctgagcactgacattcctttccagctgtcaaaatatgtggataatcagcgcttgctgagtacattcactgagtacatcaaaaacattatcaatacgtctatcctgaacctgaggtacgagagcaaccacctgatcgatttgtcccgttacgcctctaaaatcaacattggaagcaaagtgaactttgatccgatcgacaagaaccagatccagctgttcaacctggagtcatctaaaatcgaggtcatcctgaagaatgctattgtgtacaattcaatgtacgagaattttagcactagcttctggatcagaatcccaaaatactttaattccatcagcctgaacaatgagtataccatcattaattgtatggagaataactccgggtggaaagtttcactcaactacggtgaaatcatttggaccctgcaagacactcaggaaatcaaacagagggtggttttcaagtactcccagatgattaacatcagtgattatattaatagatggatctttgtgaccattacgaacaatcggctgaacaatagtaaaatctacatcaatggcaggttgattgatcaaaagccaatctctaatctgggaaacattcatgcctctaacaatatcatgtttaaacttgacggctgtagagacacgcatcgctatatctggattaaatattttaatctgtttgataaagagctgaacgagaaagagatcaaggacctgtatgataaccagagcaattctggtattctgaaggacttctggggagattacctgcagtatgacaagccctactatatgctgaatctctacgatcctaacaagtatgtggacgtgaacaatgtgggaatccgaggatacatgtacttgaagggcccccggggctccgtgatgactacaaacatctatttgaactcttccctctatcgtggtaccaaattcatcattaagaaatacgccagcggtaataaggacaacatcgtgcgcaacaatgacagagtctatattaacgtggtcgtgaaaaacaaggaatacagattggcgaccaacgcatcccaggctggtgtggagaagattctgtccgcacttgagattcccgacgttggaaaccttagtcaggtggttgtgatgaaatcaaaaaacgaccaaggtatcacaaacaaatgtaagatgaacctgcaagataacaatggcaacgacattggcttcatcggcttccaccaatttaataacatcgcaaagctggtggcttccaactggtataacagacagatcgaacggagttcacgtaccctgggatgcagttgggagttcatccctgtggacgacggctggggagagagacccctgtaa

SEQ ID NO: 67 - DNA, 3891 bp, Artificial Sequence
  BoNT/A, X. laevis-modified 1
atgcctttcgtgaacaaacagttcaattataaggaccctgtaaatggggtggatatcgcatatattaaaattcctaatgcaggacagatgcaacctgttaaagcctttaaaatacacaataagatttgggttatcccagagcgcgatacatttactaaccccgaggaaggagatctgaatccacctccagaggcaaagcaagtgccggtttcttactatgactcgacttacctaagtacagataacgagaaggataactaccttaagggggttaccaagttatttgaacggatttattccactgacttaggccgaatgttgctcacttccatcgtacgtggaattccattttggggaggtagcaccattgacactgagctgaaggttattgatacgaattgtattaacgtgatacagcctgatggaagctacaggtctgaggaacttaatctggttatcataggccctagcgccgacattatacaatttgagtgtaaaagcttcgggcacgaagtactcaatcttactagaaacggctacggatccacacaatatattaggttcagcccagactttacttttggattcgaagagtctttggaggtggatacaaacccattgctgggcgctggtaagttcgccacagatccagctgttacactggcccatgaactaattcacgcagggcataggttatatggcatcgccataaatccaaaccgtgtattcaaagtcaacacaaacgcctactatgagatgtctggacttgaggtgtctttcgaagagctgaggactttcggcggtcacgatgcgaaatttattgattcactccaggaaaacgagttccgcctgtactattacaacaagtttaaagacatagcttctacgttgaataaagctaaatctatcgtaggaaccacagcatccctccagtacatgaagaacgtctttaaggagaaatacctgttgagtgaagacacatcgggaaaatttagtgttgataagttgaaatttgataagctgtataaaatgctgacagaaatctatacagaggacaatttcgtgaaatttttcaaagttcttaaccgcaaaacctacttgaattttgacaaggctgtgtttaaaatcaatattgtgcccaaggttaattacactatatacgatggcttcaacctcaggaatactaatctggccgcgaattttaatggccaaaataccgagattaacaatatgaatttcacaaagcttaaaaactttaccggtcttttcgaattctataaacttctgtgtgtcagaggaatcattacatcgaaaactaagagtcttgataagggctataataaagcccttaatgacctctgcatcaaagtcaacaattgggatttgtttttctcaccatcagaggataattttacaaacgacttgaataaaggcgaggaaattactagcgacactaacatagaagcagccgaagagaatatttctcttgatttgatacaacagtattacttaacatttaattttgataatgaaccagagaacattagtatcgaaaatcttagcagtgatatcattggtcagttggagctgatgcccaacattgagcgttttcccaatggcaagaaatacgaactcgacaaatatacgatgttccactatttgagagctcaagaatttgagcacgggaaatcccggatagccctgacaaactctgtaaacgaagctcttttgaatccctcgagagtttataccttcttttcatctgattacgttaaaaaggtcaataaggctaccgaagccgcgatgtttcttgggtgggtcgaacaactggtgtacgattttaccgacgagacatcagaagtgagcaccactgacaaaattgctgacataactataattataccctacatcggtccggcacttaatattggtaatatgctttataaagatgacttcgtcggagccctgatcttttccggagctgtaatcttgctggagttcatcccagagattgctatacccgtcctggggaccttcgcgctcgtgtcttacattgcaaacaaggtcctgactgtacagacaatcgataacgcactaagcaaaagaaatgaaaagtgggatgaggtgtataagtacatagtcactaattggttagcaaaggtgaacacgcagatcgaccttatcaggaagaaaatgaaggaagcactcgaaaaccaggctgaggctacaaaggcaatcattaactatcagtataatcaatatactgaggaagagaagaataacatcaattttaatattgatgacctcagttcaaaactgaatgaaagcattaataaggctatgataaacattaacaagtttctgaaccagtgtagcgtgtcctatctaatgaactccatgatcccctatggcgtcaagcggctggaagactttgacgcaagcctaaaggacgctttactgaagtatatttacgataaccgaggcactcttataggacaggttgataggctgaaagataaggtgaataacacccttagtacagatatcccattccagctgtctaagtatgttgataaccagcgcctcctgtcaacctttacggagtacattaagaatattataaacacctccatcctgaatctgagatacgagtccaaccatctaatcgatctgagcagatacgcttcaaaaataaatatcggttccaaggtgaacttcgacccaattgacaagaaccaaattcagttattcaatttagaatcctcaaaaatcgaggttatcttgaagaacgccatagtatataatagcatgtacgagaatttttccacatctttctggatccgtatacctaagtactttaattctatatccttgaacaatgagtataccatcattaactgcatggagaacaattcaggttggaaggtaagcctgaattatggtgaaattatctggaccctgcaggacacccaggagattaaacagagagtggtttttaagtattcacagatgatcaatatatctgattacatcaaccggtggatcttcgtaaccattacgaataacagattaaacaatagtaaaatctacattaacggtcgactcattgatcaaaaacctattagtaacttaggaaacatccatgccagtaacaatattatgttcaaactagatggctgccgggatacacatagatacatttggattaaatattttaatctgttcgacaaggaactaaacgaaaaggaaatcaaggatttgtatgacaaccagagtaattctgggatactaaaagacttctggggggactatttacagtatgataaaccatactatatgctaaacctttatgatcctaataaatatgtcgatgtaaataacgtggggatccgtggctatatgtacctcaagggacctagaggaagtgtcatgactacaaacatatatttaaacagttctctctaccgcggaacaaagtttattatcaagaaatacgcatccgggaataaggataacatcgtccgaaataacgatcgcgtttacattaatgtagtggttaaaaataaagaataccgactggctacaaacgcaagccaggccggagtggaaaagattttgtctgctctcgaaatacccgacgtgggaaacctttctcaagtggttgtgatgaaatcaaaaaacgatcaaggaattaccaataaatgtaaaatgaacctgcaggataacaatggaaatgacattggttttattgggtttcatcagttcaataacatcgcaaaactagtggcaagcaattggtacaataggcaaatcgaaagatcaagtaggactctcggatgctcatgggaatttataccggtggacgatgggtggggtgaaaggcctttgtaa

SEQ ID NO: 68 - DNA, 3891 bp, Artificial Sequence
  BoNT/A, X. laevis-modified 2
atgccatttgtgaataaacagtttaattataaagatccagtgaatggagtggatattgcttatattaaaattccaaatgctggacagatgcagccagtgaaagcttttaaaattcataataaaatttgggtgattccagaaagagatacatttacaaatccagaagaaggagatctgaatccaccaccagaagctaaacaggtgccagtgtcttattatgattctacatatctgtctacagataatgaaaaagataattatctgaaaggagtgacaaaactgtttgaaagaatttattctacagatctgggaagaatgctgctgacatctattgtgagaggaattccattttggggaggatctacaattgatacagaactgaaagtgattgatacaaattgtattaatgtgattcagccagatggatcttatagatctgaagaactgaatctggtgattattggaccatctgctgatattattcagtttgaatgtaaatcttttggacatgaagtgctgaatctgacaagaaatggatatggatctacacagtatattagattttctccagattttacatttggatttgaagaatctctggaagtggatacaaatccactgctgggagctggaaaatttgctacagatccagctgtgacactggctcatgaactgattcatgctggacatagactgtatggaattgctattaatccaaatagagtgtttaaagtgaatacaaatgcttattatgaaatgtctggactggaagtgtcttttgaagaactgagaacatttggaggacatgatgctaaatttattgattctctgcaggaaaatgaatttagactgtattattataataaatttaaagatattgcttctacactgaataaagctaaatctattgtgggaacaacagcttctctgcagtatatgaaaaatgtgtttaaagaaaaatatctgctgtctgaagatacatctggaaaattttctgtggataaactgaaatttgataaactgtataaaatgctgacagaaatttatacagaagataattttgtgaaattttttaaagtgctgaatagaaaaacatatctgaattttgataaagctgtgtttaaaattaatattgtgccaaaagtgaattatacaatttatgatggatttaatctgagaaatacaaatctggctgctaattttaatggacagaatacagaaattaataatatgaattttacaaaactgaaaaattttacaggactgtttgaattttataaactgctgtgtgtgagaggaattattacatctaaaacaaaatctctggataaaggatataataaagctctgaatgatctgtgtattaaagtgaataattgggatctgtttttttctccatctgaagataattttacaaatgatctgaataaaggagaagaaattacatctgatacaaatattgaagctgctgaagaaaatatttctctggatctgattcagcagtattatctgacatttaattttgataatgaaccagaaaatatttctattgaaaatctgtcttctgatattattggacagctggaactgatgccaaatattgaaagatttccaaatggaaaaaaatatgaactggataaatatacaatgtttcattatctgagagctcaggaatttgaacatggaaaatctagaattgctctgacaaattctgtgaatgaagctctgctgaatccatctagagtgtatacatttttttcttctgattatgtgaaaaaagtgaataaagctacagaagctgctatgtttctgggatgggtggaacagctggtgtatgattttacagatgaaacatctgaagtgtctacaacagataaaattgctgatattacaattattattccatatattggaccagctctgaatattggaaatatgctgtataaagatgattttgtgggagctctgattttttctggagctgtgattctgctggaatttattccagaaattgctattccagtgctgggaacatttgctctggtgtcttatattgctaataaagtgctgacagtgcagacaattgataatgctctgtctaaaagaaatgaaaaatgggatgaagtgtataaatatattgtgacaaattggctggctaaagtgaatacacagattgatctgattagaaaaaaaatgaaagaagctctggaaaatcaggctgaagctacaaaagctattattaattatcagtataatcagtatacagaagaagaaaaaaataatattaattttaatattgatgatctgtcttctaaactgaatgaatctattaataaagctatgattaatattaataaatttctgaatcagtgttctgtgtcttatctgatgaattctatgattccatatggagtgaaaagactggaagattttgatgcttctctgaaagatgctctgctgaaatatatttatgataatagaggaacactgattggacaggtggatagactgaaagataaagtgaataatacactgtctacagatattccatttcagctgtctaaatatgtggataatcagagactgctgtctacatttacagaatatattaaaaatattattaatacatctattctgaatctgagatatgaatctaatcatctgattgatctgtctagatatgcttctaaaattaatattggatctaaagtgaattttgatccaattgataaaaatcagattcagctgtttaatctggaatcttctaaaattgaagtgattctgaaaaatgctattgtgtataattctatgtatgaaaatttttctacatctttttggattagaattccaaaatattttaattctatttctctgaataatgaatatacaattattaattgtatggaaaataattctggatggaaagtgtctctgaattatggagaaattatttggacactgcaggatacacaggaaattaaacagagagtggtgtttaaatattctcagatgattaatatttctgattatattaatagatggatttttgtgacaattacaaataatagactgaataattctaaaatttatattaatggaagactgattgatcagaaaccaatttctaatctgggaaatattcatgcttctaataatattatgtttaaactggatggatgtagagatacacatagatatatttggattaaatattttaatctgtttgataaagaactgaatgaaaaagaaattaaagatctgtatgataatcagtctaattctggaattctgaaagatttttggggagattatctgcagtatgataaaccatattatatgctgaatctgtatgatccaaataaatatgtggatgtgaataatgtgggaattagaggatatatgtatctgaaaggaccaagaggatctgtgatgacaacaaatatttatctgaattcttctctgtatagaggaacaaaatttattattaaaaaatatgcttctggaaataaagataatattgtgagaaataatgatagagtgtatattaatgtggtggtgaaaaataaagaatatagactggctacaaatgcttctcaggctggagtggaaaaaattctgtctgctctggaaattccagatgtgggaaatctgtctcaggtggtggtgatgaaatctaaaaatgatcagggaattacaaataaatgtaaaatgaatctgcaggataataatggaaatgatattggatttattggatttcatcagtttaataatattgctaaactggtggcttctaattggtataatagacagattgaaagatcttctagaacactgggatgttcttgggaatttattccagtggatgatggatggggagaaagaccactgtaa

SEQ ID NO: 69 - DNA, 3891 bp, Artificial Sequence
  BoNT/A, X. laevis-modified 3
atgccattcgtgaacaaacaatttaactacaaggatcccgttaacggggttgacatagcctatatcaaaattccaaatgctgggcagatgcaacccgttaaagcttttaagatacataacaagatctgggttatccccgaaagagacaccttcactaatccagaagagggggatcttaatccaccccctgaggcaaaacaggttccagtaagctattacgacagcacctacttatctacagacaatgaaaaggacaactacctcaagggggtgaccaagctctttgaacgaatatattccacagatctgggtaggatgttgctaactagcattgtgcgtggaatcccattctggggaggctcaaccatcgacacagaattgaaagtcatcgacacaaactgcattaacgtcatccaacctgatgggtcctatagaagcgaagagctgaatctggtaattatcggtccctcagcagatataattcagtttgagtgcaagtcatttggtcacgaggttctcaacctcactagaaatggttacggcagtacacagtacatccgattttctcccgactttactttcggattcgaggaatctttggaggtcgacactaatcctttgctgggggcaggcaaattcgccactgatccagccgttacactcgctcatgagttaattcatgctggtcacaggctgtacggaattgccattaatcctaacagagtgtttaaggtcaatactaatgcctattacgaaatgtccggcctcgaagtgagtttcgaagagcttagaacatttggaggtcacgacgctaaatttattgacagtttgcaggagaatgaattccgcctgtactattacaacaagtttaaagacatcgcctcaactctgaataaggctaaatctatagtaggtacaaccgcttccttacagtacatgaagaacgtctttaaggagaagtatctacttagcgaagacaccagtgggaagtttagtgttgataaacttaagttcgataagctctataaaatgttgaccgaaatctacacagaagacaactttgtaaaatttttcaaagtcttgaacagaaaaacttaccttaatttcgacaaagctgtgttcaaaatcaacattgtgccaaaagtgaactataccatttacgatggtttcaacctgcgcaatacaaatctggccgctaactttaacgggcaaaacaccgagataaacaatatgaacttcaccaagctcaagaacttcactggtctttttgagttttacaaactgctctgtgttagaggaattatcacttctaaaacaaaatctctggacaagggttacaacaaggcactgaacgatctgtgtattaaggtgaataactgggatttattctttagtccaagcgaggacaactttactaacgatctaaataagggtgaagagatcacaagtgatactaacatcgaggctgcagaagagaatatttccctggatctgattcaacagtattacctgaccttcaatttcgataacgaaccagagaatatctctatcgaaaacttatcctctgatattatcggacagctggagctgatgccaaacattgagcgatttcctaatggtaagaaatatgagctggataagtatacaatgtttcattacctacgtgctcaggagtttgaacacggaaaaagcaggatagccttgacaaactcagttaacgaggcattactgaatccaagtagggtgtacactttcttttcttccgattacgtaaagaaagtgaataaagctacagaagctgcaatgtttctgggctgggtggaacagttagtttacgatttcactgacgagacctccgaggtaagcacaaccgacaaaattgccgatattacaatcataattccttacattggacctgctcttaatatcggaaatatgctatataaagacgattttgttggagctcttatcttctcaggagctgttattctgctcgaatttatccctgagattgccatccctgtattgggcacatttgccttagtgagctacattgctaacaaggttctaacagtacagacaatagataacgcactgagtaaacgaaacgaaaagtgggacgaagtatacaagtacatagttacaaattggttagcaaaagtgaacacacaaatcgatttaatacggaaaaagatgaaggaggctttggaaaaccaagcagaggcaacaaaggccataatcaactatcaatataaccagtacaccgaagaggaaaagaataacatcaactttaatattgatgaccttagttctaaacttaatgagtctattaataaggccatgataaatataaataaatttcttaaccagtgttctgtatcatacctgatgaacagtatgatcccttatggcgtcaaaaggctcgaagattttgacgcatcacttaaagacgctcttctaaagtatatatatgacaatagaggaactttaattggccaggtggatcgcttgaaagataaagttaataacactctctctacagatataccatttcaactaagcaaatatgtcgataaccagaggctgctttctaccttcacagagtacatcaaaaatataattaataccagtatcttgaatctgaggtatgaatctaaccacttgattgatctatcacggtacgcaagcaagataaatatcggctcaaaggtgaatttcgaccccattgacaagaatcaaatacagctcttcaatcttgaatccagtaaaatcgaggttattttgaagaatgcaatagtgtataattcaatgtacgaaaacttttctacctctttttggattagaatcccaaaatatttcaacagcatcagcttgaataacgaatatacaattataaactgtatggaaaataactccgggtggaaagtgagcctgaattacggggaaatcatttggactctacaggatactcaagaaatcaagcagcgcgtagtcttcaaatattcccagatgattaacatctctgattatataaatagatggatatttgtgactattacaaataacaggctgaataactctaagatatacattaacggtcgtttaatagatcagaaaccaatttccaatctgggaaatatccatgctagtaataacattatgtttaagctggacggatgccgtgatacccatcggtatatatggattaagtacttcaatctttttgacaaagaactaaatgagaaagagattaaggatctttatgataatcagtctaattccggaattctgaaagatttctggggcgactacctccaatacgataaaccctattacatgcttaacctgtatgacccaaacaagtatgtggatgtcaataacgtcggaatacgaggctatatgtatctcaaaggacctcggggctctgtgatgaccactaacatttatttgaactccagtctttataggggcacaaagtttatcattaagaaatatgcatctggaaacaaagacaacatcgtcagaaataacgatagagtgtatatcaatgtggttgtaaagaacaaagagtataggcttgcaacaaatgcctcacaagctggagtggagaaaattttgtccgccttggaaattccagatgtagggaatctgtctcaagtggtcgtgatgaagagcaagaatgatcagggaattacaaataagtgtaaaatgaatcttcaggataataatgggaatgatatcgggttcattggatttcaccagttcaataatattgcaaagctggtcgcttcaaattggtataatcgtcagatcgaacgctcaagccggacactcggctgcagctgggagttcattcctgttgacgatggctggggagaacgccccttgtaa

SEQ ID NO: 70 - DNA, 3891 bp, Artificial Sequence
  BoNT/A, X. tropicalis-modified 1
atgcccttcgtgaacaagcagtttaactacaaggaccccgtgaatggagtggacatcgcatacattaaaattcctaacgccggacagatgcagccagttaaagcattcaagatccataataagatatgggtcataccagagcgggatacgtttacgaacccagaggaaggggatctaaatcctccacccgaggcaaagcaagtacctgtctcgtactatgacagtacctatcttagtaccgataatgagaaggataactatctgaaaggtgttacaaagctattcgaacgtatttattctactgacctagggaggatgcttttaacctccatagtgcgaggtattcccttctggggagggtccacaatcgacaccgagctgaaagtgatcgacactaattgtattaatgtaatacagccagatggatcgtaccgaagcgaagagcttaatctcgtgattatcgggccatccgctgacattatccaatttgagtgcaagagttttggccatgaggttttgaatctcactcgcaatggatatggatcaactcagtacatcaggttttctcctgatttcacatttggctttgaggaatccctggaggtggacaccaacccacttctgggcgcggggaaatttgccacagatcctgcagtcactctggctcacgagctgattcatgctgggcacagactgtacggaattgccatcaacccgaatcgtgtatttaaggtgaataccaatgcgtactatgagatgagcggtctggaagtgagctttgaggaactaagaacgtttggaggtcatgatgctaagtttatcgactcacttcaggaaaacgaatttaggctgtattactataacaaattcaaagatattgcgagtacgctgaacaaagccaagtctatcgtcgggacaactgcttcattgcagtacatgaagaatgtgttcaaagaaaaatatctgctctccgaggacacaagtggaaaattctccgtggacaagcttaaatttgataaattatataaaatgctgactgagatttacactgaagataacttcgtaaaatttttcaaggtgctgaatcgaaaaacatatctcaactttgataaggcagtgttcaaaattaacattgttcctaaggttaactatactatttatgatggttttaacctaagaaatacaaatctagcagctaatttcaatggccagaacaccgagatcaataacatgaacttcaccaagctaaaaaactttacaggacttttcgaattctataagttgctgtgcgtcaggggcatcattacttccaaaaccaagtcactggacaaggggtataataaggccttaaacgacctctgcattaaggttaacaattgggacctgtttttctctccaagtgaagataactttactaacgacttgaacaagggggaagagattacatctgatacaaacattgaagccgcagaggaaaacattagtctagatctgattcagcaatactatctaaccttcaatttcgataacgaaccggaaaacatcagtattgagaaccttagctcagacatcataggccaattggagctgatgcctaatattgaaaggttcccaaatgggaagaaatatgagctggacaagtatacaatgtttcattacttgagggcccaggaattcgaacacggcaaatctcgtatcgcccttacaaatagcgttaacgaggctctcctaaatcccagtcgcgtatacacgtttttcagttccgattatgttaagaaagtgaacaaagcaactgaggctgccatgttcttgggctgggtggagcaactcgtgtacgattttaccgacgaaacctccgaagtctctacaaccgataagattgccgacataacgattataattccatatataggccccgcactaaacattggaaatatgttgtataaggacgattttgtaggtgccttgatcttcagtggagcagtaatcttgcttgagtttatccctgaaatagccattccggttctgggtactttcgcactggtcagctatatcgctaacaaggtactgacagttcaaactatagacaatgctctttccaagcggaatgagaaatgggatgaagtctacaaatacatcgtgaccaattggctcgctaaggtgaatacacagatagacttaatccgcaaaaagatgaaggaagctttagaaaaccaagcagaagcaacgaaagctattataaactaccagtacaatcagtacacagaagaggaaaaaaataacatcaattttaatattgatgacctgtcatctaagcttaacgagagcataaataaggcaatgataaatattaataaatttctgaatcagtgctcagtaagctacctgatgaacagtatgataccgtatggagttaaacgtttggaggatttcgatgcatcgctcaaagatgcactgcttaagtatatttacgataatcgcggaacacttatcggtcaggtggatcggctgaaggacaaggtcaataacactctgtcaactgacatccccttccagctctccaaatatgttgataaccagcgtctgctctcaacctttaccgaatatataaaaaatattatcaacacctccatactcaatctgaggtatgaaagcaaccacctcattgacctgagcagatatgcttctaagatcaacatcggttctaaagtcaacttcgaccctatcgataagaaccagattcagttgtttaaccttgagtccagcaagatagaagtgattttaaaaaacgcgattgtatacaattcaatgtatgaaaactttagcacctcattctggattaggatcccaaaatactttaactccatttctctgaataacgagtacaccattatcaactgtatggagaataactccggatggaaggtcagccttaactacggcgaaatcatttggacacttcaggatacacaggaaataaagcagagggtcgtgttcaagtattctcaaatgatcaatatcagcgattacataaaccgctggatattcgtaactattactaataaccggttgaacaattctaagatttatatcaacgggagattgatcgatcaaaagcccataagcaacttaggtaacatccacgcttctaacaatatcatgtttaaacttgatggatgtcgggacacacaccgctacatttggattaaatactttaatcttttcgacaaagaactgaatgaaaaggagatcaaagacctctatgacaatcaatcaaacagcggaatcctgaaggacttttggggagattacctgcagtacgataaaccatattacatgttgaatttgtacgatccaaataagtatgtcgatgttaacaatgtgggtatacgaggctacatgtatttaaaagggcctagaggttcggttatgaccacaaatatttacttaaattcaagtttatataggggaacaaaatttataattaaaaagtacgcctctggcaataaagataatatagtcagaaataacgacagagtttacattaatgttgtggttaaaaataaggagtatcgactcgccactaatgcttctcaggccggagtggagaaaatcctgagcgccttggagattcctgacgtgggcaacttgagtcaagtggttgtaatgaaatctaaaaatgatcagggcattacaaacaagtgcaagatgaatcttcaagataataacggcaacgatatcggtttcataggctttcatcaatttaataacatcgcaaaactcgttgcttctaattggtacaatcggcagatcgagagaagctctagaactttagggtgttcctgggagtttatacctgtggatgatgggtggggagaaagacccctgtaa

SEQ ID NO: 71 - DNA, 3891 bp, Artificial Sequence
  BoNT/A, X. tropicalis-modified 2
atgccatttgtgaataagcagtttaattataaggatccagtgaatggagtggatattgcatatattaagattccaaatgcaggacagatgcagccagtgaaggcatttaagattcataataagatttgggtgattccagaaagagatacatttacaaatccagaagaaggagatctgaatccaccaccagaagcaaagcaggtgccagtgtcttattatgattctacatatctgtctacagataatgaaaaggataattatctgaagggagtgacaaagctgtttgaaagaatttattctacagatctgggaagaatgctgctgacatctattgtgagaggaattccattttggggaggatctacaattgatacagaactgaaggtgattgatacaaattgcattaatgtgattcagccagatggatcttatagatctgaagaactgaatctggtgattattggaccatctgcagatattattcagtttgaatgcaagtcttttggacatgaagtgctgaatctgacaagaaatggatatggatctacacagtatattagattttctccagattttacatttggatttgaagaatctctggaagtggatacaaatccactgctgggagcaggaaagtttgcaacagatccagcagtgacactggcacatgaactgattcatgcaggacatagactgtatggaattgcaattaatccaaatagagtgtttaaggtgaatacaaatgcatattatgaaatgtctggactggaagtgtcttttgaagaactgagaacatttggaggacatgatgcaaagtttattgattctctgcaggaaaatgaatttagactgtattattataataagtttaaggatattgcatctacactgaataaggcaaagtctattgtgggaacaacagcatctctgcagtatatgaagaatgtgtttaaggaaaagtatctgctgtctgaagatacatctggaaagttttctgtggataagctgaagtttgataagctgtataagatgctgacagaaatttatacagaagataattttgtgaagttttttaaggtgctgaatagaaagacatatctgaattttgataaggcagtgtttaagattaatattgtgccaaaggtgaattatacaatttatgatggatttaatctgagaaatacaaatctggcagcaaattttaatggacagaatacagaaattaataatatgaattttacaaagctgaagaattttacaggactgtttgaattttataagctgctgtgcgtgagaggaattattacatctaagacaaagtctctggataagggatataataaggcactgaatgatctgtgcattaaggtgaataattgggatctgtttttttctccatctgaagataattttacaaatgatctgaataagggagaagaaattacatctgatacaaatattgaagcagcagaagaaaatatttctctggatctgattcagcagtattatctgacatttaattttgataatgaaccagaaaatatttctattgaaaatctgtcttctgatattattggacagctggaactgatgccaaatattgaaagatttccaaatggaaagaagtatgaactggataagtatacaatgtttcattatctgagagcacaggaatttgaacatggaaagtctagaattgcactgacaaattctgtgaatgaagcactgctgaatccatctagagtgtatacatttttttcttctgattatgtgaagaaggtgaataaggcaacagaagcagcaatgtttctgggatgggtggaacagctggtgtatgattttacagatgaaacatctgaagtgtctacaacagataagattgcagatattacaattattattccatatattggaccagcactgaatattggaaatatgctgtataaggatgattttgtgggagcactgattttttctggagcagtgattctgctggaatttattccagaaattgcaattccagtgctgggaacatttgcactggtgtcttatattgcaaataaggtgctgacagtgcagacaattgataatgcactgtctaagagaaatgaaaagtgggatgaagtgtataagtatattgtgacaaattggctggcaaaggtgaatacacagattgatctgattagaaagaagatgaaggaagcactggaaaatcaggcagaagcaacaaaggcaattattaattatcagtataatcagtatacagaagaagaaaagaataatattaattttaatattgatgatctgtcttctaagctgaatgaatctattaataaggcaatgattaatattaataagtttctgaatcagtgctctgtgtcttatctgatgaattctatgattccatatggagtgaagagactggaagattttgatgcatctctgaaggatgcactgctgaagtatatttatgataatagaggaacactgattggacaggtggatagactgaaggataaggtgaataatacactgtctacagatattccatttcagctgtctaagtatgtggataatcagagactgctgtctacatttacagaatatattaagaatattattaatacatctattctgaatctgagatatgaatctaatcatctgattgatctgtctagatatgcatctaagattaatattggatctaaggtgaattttgatccaattgataagaatcagattcagctgtttaatctggaatcttctaagattgaagtgattctgaagaatgcaattgtgtataattctatgtatgaaaatttttctacatctttttggattagaattccaaagtattttaattctatttctctgaataatgaatatacaattattaattgcatggaaaataattctggatggaaggtgtctctgaattatggagaaattatttggacactgcaggatacacaggaaattaagcagagagtggtgtttaagtattctcagatgattaatatttctgattatattaatagatggatttttgtgacaattacaaataatagactgaataattctaagatttatattaatggaagactgattgatcagaagccaatttctaatctgggaaatattcatgcatctaataatattatgtttaagctggatggatgcagagatacacatagatatatttggattaagtattttaatctgtttgataaggaactgaatgaaaaggaaattaaggatctgtatgataatcagtctaattctggaattctgaaggatttttggggagattatctgcagtatgataagccatattatatgctgaatctgtatgatccaaataagtatgtggatgtgaataatgtgggaattagaggatatatgtatctgaagggaccaagaggatctgtgatgacaacaaatatttatctgaattcttctctgtatagaggaacaaagtttattattaagaagtatgcatctggaaataaggataatattgtgagaaataatgatagagtgtatattaatgtggtggtgaagaataaggaatatagactggcaacaaatgcatctcaggcaggagtggaaaagattctgtctgcactggaaattccagatgtgggaaatctgtctcaggtggtggtgatgaagtctaagaatgatcagggaattacaaataagtgcaagatgaatctgcaggataataatggaaatgatattggatttattggatttcatcagtttaataatattgcaaagctggtggcatctaattggtataatagacagattgaaagatcttctagaacactgggatgctcttgggaatttattccagtggatgatggatggggagaaagaccactgtaa

SEQ ID NO: 72 - DNA, 3891 bp, Artificial Sequence
  BoNT/A, X. tropicalis-modified 3
atgccattcgttaataagcagttcaactacaaagacccagtgaacggggtagatattgcctatattaagatcccaaacgctggacagatgcaacccgtcaaagcatttaagattcataacaaaatctgggttatccctgagcgagacacttttacaaaccccgaagagggcgacctcaatccaccccctgaagcaaagcaggttccagtctcatattacgattccacatatttgtctaccgacaacgaaaaggataattacttaaagggggtgaccaaactctttgagagaatctatagcacagacctgggtcgtatgcttttgacatcaatagtcagagggatccctttctggggtggatccactattgataccgaactgaaggtgatcgatactaattgtatcaacgtaatccaacctgatggatcttatcgaagcgaagagttgaatttggttattatcggaccaagcgccgacattatccagtttgagtgcaaatcattcggacacgaagtattaaatctaactaggaacggatatggttcaacacagtatattcggttctctccagattttacatttgggttcgaagagagtcttgaggtggacaccaacccactccttggcgctggtaagtttgcaaccgatccagctgtaacactagcacatgaactcattcacgctgggcaccgcctgtacgggatcgccattaacccaaacagagtctttaaagttaatactaatgcctactatgaaatgagcgggctggaggtgagtttcgaggaattgaggacatttggaggccacgatgcaaaattcatcgactctcttcaggagaatgagttccgtctctattactataataaattcaaagacatcgcctcaacacttaataaggccaagagtatcgtaggtaccacagcaagtcttcaatacatgaaaaatgtctttaaggaaaaatacctgttatccgaggatacatctggaaagttctctgtggataagttgaaatttgataaattgtataagatgttaaccgaaatttatactgaggataattttgtcaagttctttaaggttcttaatagaaaaacctacctgaacttcgacaaggctgtctttaaaataaatattgtgcccaaggttaactacacaatctacgatggatttaacttgcggaacacaaatctcgctgcaaactttaacggacaaaatacagagataaataacatgaattttacaaagcttaagaattttacagggctgtttgagttctataaattgctttgcgttaggggcatcattactagtaaaaccaagagcctggacaagggctacaataaagctttaaatgacttgtgtataaaagttaataactgggaccttttcttttctccctccgaagataattttactaatgatctaaataagggagaggaaatcactagtgatacaaatatagaggctgccgaagagaacattagtcttgacttgatccagcaatactatctaacttttaacttcgataatgagccagaaaacatctctattgaaaacctgtcatctgatattatcggccagctggagctgatgcctaacatagagcgattccctaacggcaaaaagtatgaactcgacaagtataccatgttccattacctgcgcgcacaagagtttgaacatggaaaaagccgcattgcccttactaattctgtcaatgaggcattattgaacccatcccgggtctacactttcttttcctcagattatgtcaagaaagtaaataaggcaacagaggctgcaatgttcctcggatgggtggaacagctagtctatgattttacagatgaaacaagcgaagtcagcaccactgacaagatcgccgacatcaccataattatcccatacattggaccagcactcaacatcggcaacatgttgtacaaagatgacttcgtcggtgctctcatttttagcggagcagttattctcttagagtttattcctgaaatagcaattcctgtgttaggcaccttcgctctggttagctatattgcaaataaggttcttaccgtgcagactatagacaatgcattgagcaaaaggaacgaaaagtgggatgaggtatacaaatacattgttacaaactggctcgccaaggtaaacactcagatcgatctcatacggaagaaaatgaaggaggcccttgagaaccaggctgaagcaacaaaagcaatcataaattatcagtacaatcagtacacagaggaagagaagaataacattaatttcaacatagacgatctgtcttcaaaactaaacgaatctataaataaggctatgatcaatattaataagttcctgaatcagtgctccgtttcttatcttatgaacagtatgataccttacggggtgaagcgactagaagacttcgacgcatcccttaaggatgccctgttgaaatatatatacgacaatagaggcacactgattggtcaggtggatagactgaaagacaaagtgaataacactctgagcaccgatattcccttccagctgagcaaatacgtcgataatcaaaggctactgtctacattcaccgagtatattaagaatataattaatacttccattctcaacctgagatacgaatctaaccatctgatcgatctgagtagatatgctagcaaaattaatatcggctcaaaagtgaattttgacccaatcgataaaaaccagattcagctctttaacctggagagttccaagatagaagtaatattaaagaacgccatcgtttataatagtatgtacgaaaattttagtacatctttttggatacgcattcccaaatactttaatagcatttccttgaacaatgaatacactataattaactgtatggagaacaattccggttggaaggtgagtctaaactacggtgagatcatttggacacttcaagacacacaggaaattaagcaaagggttgtatttaaatacagccaaatgatcaacatctctgactacattaatcgttggatttttgtgaccatcaccaataacagacttaacaatagcaaaatatatataaatggtaggcttattgatcaaaagcctatttccaacctgggaaacatccacgcatctaacaatatcatgttcaaactggacggatgtcgggacactcacaggtacatttggatcaaatactttaacctgtttgataaggagttaaatgaaaaagaaattaaagatctatatgataaccagtcaaactctggaatattgaaagatttttggggggattacctgcaatatgacaaaccctattacatgctgaacctgtatgatcctaacaagtatgtagatgtaaacaatgtggggattcggggctatatgtatctgaaagggccaagaggaagcgttatgaccacaaacatctatctgaactcatccctgtataggggcaccaaattcatcattaaaaagtatgcatctggtaacaaagacaacattgtgcgtaacaatgatcgcgtgtacattaatgtggttgtgaagaataaggaatatagattagctacaaacgcctcccaagccggagtggagaagatactatccgctctggagatcccagatgttggtaatctgtctcaggtggtggtgatgaaaagtaagaatgaccagggcatcacaaataagtgcaaaatgaacctgcaggataacaatggcaacgatataggctttataggattccatcagttcaataacatcgccaagctcgtggcttctaattggtacaatcgacagattgaacgctcttcacgtactttgggttgctcatgggaattcatacctgtggacgacgggtggggggagaggcccctttaa

SEQ ID NO: 73 - DNA, 3891 bp, Artificial Sequence
  BoNT/A, G. gallus-modified 1
atgcctttcgtgaacaagcagttcaactataaggatccagtgaacggggtggacatcgcttacatcaagatcccaaacgcaggacagatgcaacccgtgaaagcttttaagattcacaataaaatttgggtcattccagaacgggacacattcactaaccctgaggaaggcgatctgaacccccctccagaggcgaaacaggtgcccgtcagctattacgacagtacctacttatctactgacaatgagaaagacaattacttgaagggcgtgactaagcttttcgaaaggatatacagcactgatcttggcagaatgcttctgaccagcattgtacgcggcattccgttctgggggggaagtactattgacacagaacttaaagttatcgatactaactgtatcaacgttatccagcctgacggctcctatcgctccgaggaactaaaccttgttattataggtccgagtgcggacatcatacagttcgaatgcaaatcgttcgggcacgaggtcctgaatctgacccgcaacgggtacggatccacacagtatatcaggttttcccccgacttcacctttggtttcgaagagtctttggaagtggacacaaaccctctgctcggcgcaggtaaatttgctacagacccagcagtgaccctcgctcatgaacttattcatgcaggccatcggctctatgggatagccatcaacccaaatcgggtgtttaaggttaatactaacgcctactatgagatgtcgggcctggaagtcagcttcgaggaactccgcacgttcggcggtcacgatgctaagtttatcgattccctccaggagaacgagttccggttgtactattacaacaagttcaaagacatcgctagcacattaaataaggccaaatcaatcgtgggaacaaccgcttcgctgcagtatatgaagaacgttttcaaagagaagtatctgttgtcggaagatacaagcggaaagttctctgtggataaattgaagtttgataaattgtacaaaatgttgaccgaaatctataccgaggataattttgtgaagttctttaaagtcctgaaccgtaagacatatcttaacttcgataaagccgtctttaagattaacattgtgcctaaagttaactacacaatatatgacggattcaatttgaggaatactaacctggctgcgaactttaatggccagaacaccgaaatcaacaatatgaattttaccaaactcaagaactttacggggctctttgagttctacaagctgttatgcgtacgagggatcattacctcaaagacaaagagtttggataagggttataataaggccctaaacgatctgtgcattaaagttaacaattgggacctttttttctcaccctccgaggacaatttcacgaacgacctcaacaaaggagaagagatcacaagcgacaccaatatcgaggcagcggaggaaaacatttccctagacctcattcagcaatattacctgacattcaattttgataatgaaccggagaatatctctatcgagaatctgagttctgacattataggacaacttgagctgatgcccaacatcgagagatttcctaatgggaagaaatacgagctggacaagtataccatgtttcactacctgcgcgctcaggaattcgagcacggtaaatcgaggattgcacttaccaatagcgtcaacgaggccctgttgaacccttctagggtgtacactttcttttcttccgattatgtgaaaaaggtaaacaaggcgaccgaagcagctatgttcctgggctgggttgagcagctcgtctatgattttaccgacgagactagtgaggtgtccacaacggacaagattgcagatatcactattatcataccatacataggtcccgccctgaatatcggaaacatgctgtacaaggatgacttcgtcggagccctgatcttctccggggctgtcattctgctcgagttcatccctgaaatagccatcccggtcctgggtaccttcgcattggtgtcatacatcgctaataaagttctgaccgtgcagacgatagataacgctctgagcaaacgaaatgagaagtgggatgaggtgtataagtacatcgtaaccaactggcttgcaaaagtgaacacccaaattgatctgatcagaaagaaaatgaaggaggccctggaaaaccaagctgaagccacaaaggcaattatcaactaccaatacaatcaatatacagaggaagagaaaaacaatattaactttaatatcgatgaccttagcagtaaactgaatgaaagcatcaataaagcaatgataaatattaacaaatttctgaaccaatgctcagtgagctacctgatgaatagtatgataccatatggcgtaaaacggctcgaggactttgacgcctccctgaaggacgccctccttaaatacatatacgacaatcgtggtacgcttatcggacaggtggaccgcttaaaggataaggttaataacactctgtctaccgatatcccctttcaactgagcaagtatgtggataaccagagactgctctctacattcacagagtatatcaaaaacataattaatactagcattttgaacctccggtacgagtcaaatcatctgatcgacctgagtaggtacgccagtaagatcaacattgggagcaaggttaatttcgatccaatcgataagaaccagatccagttatttaacctggagtcctcaaaaatcgaagtaatactcaaaaacgccatcgtttacaatagcatgtacgaaaatttttccacttctttttggataaggattcccaagtacttcaacagcatctcactgaacaatgaatacacaatcattaactgtatggagaacaattctggctggaaggtttctttgaattacggcgagataatttggaccctacaggatacgcaggaaataaaacagcgagtggtcttcaaatacagccagatgatcaacatttccgactacattaacagatggatattcgtgactataactaacaataggctgaacaatagcaaaatctacatcaatggccggctcattgaccagaagccgatttcgaatctgggaaacattcacgcttcaaacaatataatgtttaagctagatggctgccgtgatactcacagatatatatggatcaaatatttcaatttatttgataaggaacttaacgagaaggaaatcaaggatttatacgacaaccagagtaactctggaattctcaaagacttttggggggattacctccaatacgataaaccttattacatgctgaatttgtacgacccaaataaatacgtagatgttaacaatgtcggaatcagagggtatatgtatctaaaaggacccagaggatcagtaatgacgactaacatctacttaaacagctcactgtatcggggtacgaaattcatcattaagaaatacgcgagcggcaacaaggacaatatcgtgcgaaataacgacagagtgtacattaacgtcgtggtaaagaacaaagaatatcgcctcgctacgaacgcatctcaggcaggggttgaaaagattctgtccgcgctggagattcctgacgtcggaaatttgtcccaagtggtcgtgatgaagtctaagaacgatcaggggattacaaataagtgtaagatgaacctacaggacaacaatggaaatgatatcggctttattggcttccatcagttcaataacatcgccaagctggtggcctcaaattggtataaccgccagatcgaaagaagctcccgtacattaggctgtagttgggagtttattcccgtggatgatggttggggggagaggccactgtaa

SEQ ID NO: 74 - DNA, 3891 bp, Artificial Sequence
  BoNT/A, G. gallus-modified 2
atgccattcgtgaacaagcagttcaactacaaggatccagtgaacggcgtggatatcgcctacatcaagatcccaaacgccggccagatgcagccagtgaaggccttcaagatccacaacaagatctgggtgatcccagagagagataccttcaccaacccagaggagggcgatctgaacccaccaccagaggccaagcaggtgccagtgagctactacgatagcacctacctgagcaccgataacgagaaggataactacctgaagggcgtgaccaagctgttcgagagaatctacagcaccgatctgggcagaatgctgctgaccagcatcgtgagaggcatcccattctggggcggcagcaccatcgataccgagctgaaggtgatcgataccaactgcatcaacgtgatccagccagatggcagctacagaagcgaggagctgaacctggtgatcatcggcccaagcgccgatatcatccagttcgagtgcaagagcttcggccacgaggtgctgaacctgaccagaaacggctacggcagcacccagtacatcagattcagcccagatttcaccttcggcttcgaggagagcctggaggtggataccaacccactgctgggcgccggcaagttcgccaccgatccagccgtgaccctggcccacgagctgatccacgccggccacagactgtacggcatcgccatcaacccaaacagagtgttcaaggtgaacaccaacgcctactacgagatgagcggcctggaggtgagcttcgaggagctgagaaccttcggcggccacgatgccaagttcatcgatagcctgcaggagaacgagttcagactgtactactacaacaagttcaaggatatcgccagcaccctgaacaaggccaagagcatcgtgggcaccaccgccagcctgcagtacatgaagaacgtgttcaaggagaagtacctgctgagcgaggataccagcggcaagttcagcgtggataagctgaagttcgataagctgtacaagatgctgaccgagatctacaccgaggataacttcgtgaagttcttcaaggtgctgaacagaaagacctacctgaacttcgataaggccgtgttcaagatcaacatcgtgccaaaggtgaactacaccatctacgatggcttcaacctgagaaacaccaacctggccgccaacttcaacggccagaacaccgagatcaacaacatgaacttcaccaagctgaagaacttcaccggcctgttcgagttctacaagctgctgtgcgtgagaggcatcatcaccagcaagaccaagagcctggataagggctacaacaaggccctgaacgatctgtgcatcaaggtgaacaactgggatctgttcttcagcccaagcgaggataacttcaccaacgatctgaacaagggcgaggagatcaccagcgataccaacatcgaggccgccgaggagaacatcagcctggatctgatccagcagtactacctgaccttcaacttcgataacgagccagagaacatcagcatcgagaacctgagcagcgatatcatcggccagctggagctgatgccaaacatcgagagattcccaaacggcaagaagtacgagctggataagtacaccatgttccactacctgagagcccaggagttcgagcacggcaagagcagaatcgccctgaccaacagcgtgaacgaggccctgctgaacccaagcagagtgtacaccttcttcagcagcgattacgtgaagaaggtgaacaaggccaccgaggccgccatgttcctgggctgggtggagcagctggtgtacgatttcaccgatgagaccagcgaggtgagcaccaccgataagatcgccgatatcaccatcatcatcccatacatcggcccagccctgaacatcggcaacatgctgtacaaggatgatttcgtgggcgccctgatcttcagcggcgccgtgatcctgctggagttcatcccagagatcgccatcccagtgctgggcaccttcgccctggtgagctacatcgccaacaaggtgctgaccgtgcagaccatcgataacgccctgagcaagagaaacgagaagtgggatgaggtgtacaagtacatcgtgaccaactggctggccaaggtgaacacccagatcgatctgatcagaaagaagatgaaggaggccctggagaaccaggccgaggccaccaaggccatcatcaactaccagtacaaccagtacaccgaggaggagaagaacaacatcaacttcaacatcgatgatctgagcagcaagctgaacgagagcatcaacaaggccatgatcaacatcaacaagttcctgaaccagtgcagcgtgagctacctgatgaacagcatgatcccatacggcgtgaagagactggaggatttcgatgccagcctgaaggatgccctgctgaagtacatctacgataacagaggcaccctgatcggccaggtggatagactgaaggataaggtgaacaacaccctgagcaccgatatcccattccagctgagcaagtacgtggataaccagagactgctgagcaccttcaccgagtacatcaagaacatcatcaacaccagcatcctgaacctgagatacgagagcaaccacctgatcgatctgagcagatacgccagcaagatcaacatcggcagcaaggtgaacttcgatccaatcgataagaaccagatccagctgttcaacctggagagcagcaagatcgaggtgatcctgaagaacgccatcgtgtacaacagcatgtacgagaacttcagcaccagcttctggatcagaatcccaaagtacttcaacagcatcagcctgaacaacgagtacaccatcatcaactgcatggagaacaacagcggctggaaggtgagcctgaactacggcgagatcatctggaccctgcaggatacccaggagatcaagcagagagtggtgttcaagtacagccagatgatcaacatcagcgattacatcaacagatggatcttcgtgaccatcaccaacaacagactgaacaacagcaagatctacatcaacggcagactgatcgatcagaagccaatcagcaacctgggcaacatccacgccagcaacaacatcatgttcaagctggatggctgcagagatacccacagatacatctggatcaagtacttcaacctgttcgataaggagctgaacgagaaggagatcaaggatctgtacgataaccagagcaacagcggcatcctgaaggatttctggggcgattacctgcagtacgataagccatactacatgctgaacctgtacgatccaaacaagtacgtggatgtgaacaacgtgggcatcagaggctacatgtacctgaagggcccaagaggcagcgtgatgaccaccaacatctacctgaacagcagcctgtacagaggcaccaagttcatcatcaagaagtacgccagcggcaacaaggataacatcgtgagaaacaacgatagagtgtacatcaacgtggtggtgaagaacaaggagtacagactggccaccaacgccagccaggccggcgtggagaagatcctgagcgccctggagatcccagatgtgggcaacctgagccaggtggtggtgatgaagagcaagaacgatcagggcatcaccaacaagtgcaagatgaacctgcaggataacaacggcaacgatatcggcttcatcggcttccaccagttcaacaacatcgccaagctggtggccagcaactggtacaacagacagatcgagagaagcagcagaaccctgggctgcagctgggagttcatcccagtggatgatggctggggcgagagaccactgtaa

SEQ ID NO: 75 - DNA, 3891 bp, Artificial Sequence
  BoNT/A, G. gallus-modified 3
atgcccttcgtgaacaaacagttcaactataaggacccggtaaatggggtggacattgcttacatcaagatccctaacgccgggcagatgcagccagtgaaggcgttcaaaatacataacaaaatctgggtgattcccgaacgggatacctttacaaaccctgaggaaggcgacctgaatcctcccccagaagcaaagcaggtcccagtaagctattacgattccacctatctcagcaccgacaatgaaaaagataattatctgaagggcgtgaccaaacttttcgaaagaatatatagcacagaccttggccggatgctgttgacttctattgtgagggggattcccttttggggcgggagcaccatagatacggagcttaaggttatcgacacaaactgcataaacgttatccagcctgacggatcatatcggagcgaggaactgaatctggtcattatcggcccctctgctgacattatccagtttgagtgtaaatcatttggtcacgaggttttgaacctcacacgtaacgggtacgggagtactcagtatatccgctttagcccagatttcactttcggattcgaggaaagcctggaggtcgataccaatccgctgcttggagccggaaagttcgcaacggaccccgcagtaaccctggcacacgagctcattcacgcagggcaccgcctgtatggaattgccataaatccaaaccgcgtgttcaaggtaaacacaaacgcatattacgagatgagcggactggaggttagcttcgaagagcttagaaccttcggcgggcacgatgctaaatttatcgacagtctccaggagaatgaattccgattgtattactataacaagttcaaggatatcgcctctactttgaataaagctaagtctatagtgggaacaaccgccagccttcagtatatgaaaaatgttttcaaggagaagtacctgctcagtgaagacaccagcggaaagttcagcgtagacaaactgaagttcgacaagctgtacaagatgctgacggaaatttatacagaggataactttgtgaaatttttcaaggtgctcaaccgcaagacgtacttgaattttgacaaggcagtcttcaagatcaacattgttccaaaggtgaattacactatctacgacggcttcaacttgagaaacaccaacctggcggctaactttaacggccagaacaccgagattaataacatgaacttcactaagctgaaaaacttcacaggtctcttcgagttctacaaacttctgtgtgtgaggggaatcattacatctaaaaccaagtccctggacaaaggctataataaagcgcttaatgacctgtgtatcaaagtcaataactgggacctgtttttcagtccgtctgaggataacttcaccaacgacctgaacaaaggcgaggaaataacctctgacacgaatatcgaggctgccgaagagaacatctcactggatcttattcagcaatactatctcacttttaactttgataatgagcctgagaatatctcaattgaaaacctcagtagcgacattatcggacagctggaactgatgccaaacatcgagaggttccccaacggcaagaaatacgagctggataagtacactatgtttcattacctgagagcacaagagtttgaacatggtaagtccaggatagccctgacgaactccgtgaatgaagccttgctgaatcctagcagagtttacacattcttttcaagtgattacgtcaagaaagtgaataaggcgacggaagccgctatgtttctggggtgggtcgaacaactggtgtatgatttcaccgatgagacttccgaggtctctacaactgacaagattgctgacatcactattataatcccttatatcggacccgctctgaatataggtaacatgctttacaaagatgactttgtaggtgctctgatatttagcggcgccgttatcctcctggagttcatcccagagatcgccattcctgtgttgggtactttcgcactggtttcttacatcgctaataaggtcctcacagtccagactatcgacaacgcgttgagcaaacgaaatgaaaaatgggatgaagtgtacaagtacattgtgacgaactggctggctaaagtgaacacccaaatagacctgatcagaaaaaagatgaaagaagccctggaaaaccaggctgaggccacaaaagccattatcaattatcagtataatcaatacacagaagaggaaaaaaacaatatcaattttaatatcgacgatctttcatccaagttgaatgagagcatcaacaaagcgatgattaatataaataagttcctgaaccagtgctccgtgagctaccttatgaattctatgattccctacggtgtcaaaaggctggaggattttgatgccagtctgaaggatgcactgctcaaatacatctacgacaaccgcggcactctgataggacaagtagatcgtctgaaagataaggttaataacaccttgtctactgacattccatttcagctgtccaaatacgttgataaccaaaggctgttgagcacgtttacggagtatattaaaaacatcataaacacaagcattctgaacctgaggtatgaaagtaatcacctcatcgatctcagcagatacgcttcaaaaatcaatattggatccaaggtgaatttcgatcctatagataagaaccaaatccagttgttcaatctcgaatcaagcaagatcgaagtaatcctgaaaaatgcaatcgtttacaattccatgtacgagaattttagtacatccttttggattaggatacctaaatacttcaacagcatttccttgaacaatgagtacacaattatcaactgcatggagaataactctggctggaaagtgagccttaattatggggaaatcatttggaccctgcaagacacacaggagattaagcagcgagtggttttcaagtactcccagatgatcaacatctccgattatattaatagatggatcttcgttacaattactaacaatcggctcaacaattccaagatttacatcaatggacgtctgattgatcagaagcccatctctaacctgggtaacattcacgctagtaacaatatcatgtttaagctggacggttgtcgtgacacccatcgctacatttggataaagtattttaatctgtttgacaaagaactcaacgaaaaggaaataaaggacctgtacgataatcagagcaattcagggatcctcaaagatttttggggagactacctgcagtacgataaaccgtattacatgctcaatttgtacgatcccaacaagtacgtagacgtgaataacgtcggtatccgcggctacatgtacctgaaaggaccgagggggagcgtgatgactacaaacatttacctgaacagctctctgtatagagggaccaagtttataattaagaaatatgcatccggaaacaaggataatatcgtgcgcaataacgatcgggtgtatatcaatgtggtcgtgaagaacaaagagtatagactggccaccaacgcgagtcaagcaggagtggagaagatactttctgccctggagatcccagatgtcggcaaccttagtcaagtggtcgttatgaaatccaagaacgatcagggcattactaacaagtgcaaaatgaacctgcaggacaacaatggtaacgacatcgggttcattggctttcatcagtttaacaatatcgctaagctggtcgcatcaaactggtataaccggcagattgaacgaagctcacggacactgggctgctcatgggagttcatacctgtggacgatggctggggggagcggccactctaa

SEQ ID NO: 76 - DNA, 3891 bp, Artificial Sequence
  BoNT/A, M. musculus-modified 1
atgcctttcgtgaataagcagtttaactacaaggaccctgttaacggtgtggatatcgcctacatcaagattccaaatgctgggcagatgcagccagtcaaagcttttaagatacataacaagatctgggtcatccccgagagagatacattcactaatcccgaggaaggggacctgaacccccctcccgaggcaaagcaggtgcccgtaagttactatgactcaacgtacctctccacagataacgagaaggacaattatctgaagggagtgaccaagctgtttgagcgaatctattccaccgatttgggccgcatgctgctaacgagcatcgtcagaggtatacccttctggggcggaagcacaattgatactgagctgaaggtcattgacactaactgcataaatgttatccaacctgatgggtcatataggagcgaagagctcaacttggtaatcattggcccgtcagccgacatcatacaatttgaatgcaagagctttggtcacgaagtgttgaacctcactaggaacggatatggaagtacccagtacatcagatttagccctgactttaccttcggctttgaggaatcactggaagtagacactaacccactactgggcgccgggaagttcgctacagacccagctgtcaccttggcacacgagctgattcatgcgggacacaggctttacggcatcgctatcaacccgaaccgcgttttcaaggtgaacacgaatgcttactatgagatgtccggcctggaggtatcattcgaggaattgaggacattcggcggtcatgacgctaagtttatcgatagcttacaggagaacgagttcaggttgtattactataacaagttcaaagatattgccagcactctgaacaaggccaagtccatcgtgggcaccacagcctcgctgcagtacatgaagaacgtattcaaggagaagtatctactctccgaggatacaagtgggaaatttagtgtcgataaactgaaattcgataagctttacaaaatgctgaccgaaatctacactgaagacaatttcgtgaagttctttaaagttctcaacagaaaaacttacctcaacttcgataaagccgtgtttaagatcaacatcgtcccaaaagttaactataccatctacgacgggtttaatctccgtaatactaatctggcagccaattttaacggacaaaacacggaaataaataacatgaactttaccaaactcaagaacttcactgggctttttgagttctataagctcttgtgtgtgagagggattatcacctctaagaccaagagcttagataagggatataataaagcactcaatgatctgtgcatcaaagtgaacaattgggatctcttcttttctccatccgaggataactttaccaacgatttaaacaaaggagaggaaattacctcagatacaaatatagaagccgctgaggaaaacatttccttggacttaatccagcaatactatctaacttttaatttcgacaacgagcccgagaatatctccatcgagaatttatcttccgatattatcggccaactggagttaatgcctaatattgagcgttttccaaacggaaagaaatacgagctcgataaatacactatgttccattatttgcgggcacaggagttcgaacacggcaagtctcggatcgccctgacaaactcagtgaatgaagctttactgaacccatcccgggtctacacctttttctcctctgactatgttaaaaaggtgaataaagcgacagaggctgcaatgttcctcggatgggttgaacagctggtttacgattttactgacgagaccagtgaggtgtcgactaccgacaagatcgcagacatcaccataattatcccctatataggccctgccctgaatatcggtaatatgctctataaggacgatttcgtcggcgctcttatcttctctggagccgtgattcttctggagttcatcccggagatcgctatcccagtacttggtacatttgcccttgtgtcttacatcgctaacaaggtgctgaccgtgcagaccattgacaacgccctaagtaaacgcaacgaaaagtgggacgaggtgtataagtacattgtgactaactggctggcaaaggtcaacacacagattgacctgattagaaaaaagatgaaagaagccctggaaaatcaggctgaggccactaaggccattatcaattatcagtacaatcaatatactgaggaagagaagaataacattaactttaacatagatgacctatcctcaaagctgaatgaaagtattaataaggctatgatcaatatcaacaaatttctcaaccagtgctcagtgtcttatctcatgaacagtatgattccctatggtgtgaaacgccttgaggactttgatgcgagtctgaaggacgctctgttgaaatatatttatgataatcgggggacactaatcggacaagtggaccgcctcaaagacaaagtgaacaataccctcagcacagatatcccattccagctatccaagtacgtcgacaaccaacgcttgctgtccaccttcaccgaatacattaaaaacataattaacaccagcatcctgaatctaaggtacgaatctaatcacctcattgatctgtctcgctatgcctcaaagatcaacattggctctaaagtcaatttcgaccctatcgacaagaaccagatccagcttttcaatcttgaatccagcaaaatagaggtgatattgaaaaatgcgatcgtttacaattcgatgtacgaaaacttttctacttctttttggatccgcatcccgaagtatttcaatagcatcagtctgaataacgagtatacaatcattaactgcatggaaaacaatagcggatggaaggtgtccctgaactatggcgagatcatttggaccctgcaggatacgcaggaaatcaagcagcgtgtggtcttcaagtattcacagatgatcaacatatccgattatataaaccggtggattttcgtgaccattacgaataaccgattgaataacagcaaaatttacatcaacggcagacttattgaccagaagcccatctcaaacctcggtaacattcacgcctccaataacatcatgtttaagctggacgggtgtcgagacacgcatcggtacatttggattaagtacttcaatttgtttgacaaggagcttaacgaaaaagagattaaagatctttacgacaatcaatctaattctggcatcctgaaagacttttggggcgattacctgcagtacgacaagccctactatatgctcaatctttacgatccaaacaagtacgtggacgtcaacaatgttggcattagagggtacatgtacctgaaaggtcctcgagggtcggttatgacaacaaacatatacttgaattctagcctgtacaggggaacaaaattcatcataaagaaatacgcaagtggaaataaagataacatagtgcggaataacgatcgagtatatattaacgtggtcgtaaagaacaaagagtacaggctcgccacaaatgcatcccaggccggagtggaaaagatccttagcgcactggaaatccctgacgtcggcaatctgagccaggtcgtagtgatgaagagtaaaaatgatcagggaataacaaacaagtgtaagatgaacctgcaagacaacaatgggaatgacattggtttcatcgggttccaccagttcaacaatatagcgaagctggtcgcaagcaactggtacaacagacagattgagaggagtagccgtacactggggtgtagctgggaattcatccctgttgacgacggttggggcgagcggcctctgtga

SEQ ID NO: 77 - DNA, 3891 bp, Artificial Sequence
  BoNT/A, M. musculus-modified 2
atgcctttcgtgaacaagcagttcaactacaaggaccctgtgaacggcgtggacatcgcctacatcaagatccctaacgccggccagatgcagcctgtgaaggccttcaagatccacaacaagatctgggtgatccctgagagagacaccttcaccaaccctgaggagggcgacctgaaccctcctcctgaggccaagcaggtgcctgtgagctactacgacagcacctacctgagcaccgacaacgagaaggacaactacctgaagggcgtgaccaagctgttcgagagaatctacagcaccgacctgggcagaatgctgctgaccagcatcgtgagaggcatccctttctggggcggcagcaccatcgacaccgagctgaaggtgatcgacaccaactgcatcaacgtgatccagcctgacggcagctacagaagcgaggagctgaacctggtgatcatcggccctagcgccgacatcatccagttcgagtgcaagagcttcggccacgaggtgctgaacctgaccagaaacggctacggcagcacccagtacatcagattcagccctgacttcaccttcggcttcgaggagagcctggaggtggacaccaaccctctgctgggcgccggcaagttcgccaccgaccctgccgtgaccctggcccacgagctgatccacgccggccacagactgtacggcatcgccatcaaccctaacagagtgttcaaggtgaacaccaacgcctactacgagatgagcggcctggaggtgagcttcgaggagctgagaaccttcggcggccacgacgccaagttcatcgacagcctgcaggagaacgagttcagactgtactactacaacaagttcaaggacatcgccagcaccctgaacaaggccaagagcatcgtgggcaccaccgccagcctgcagtacatgaagaacgtgttcaaggagaagtacctgctgagcgaggacaccagcggcaagttcagcgtggacaagctgaagttcgacaagctgtacaagatgctgaccgagatctacaccgaggacaacttcgtgaagttcttcaaggtgctgaacagaaagacctacctgaacttcgacaaggccgtgttcaagatcaacatcgtgcctaaggtgaactacaccatctacgacggcttcaacctgagaaacaccaacctggccgccaacttcaacggccagaacaccgagatcaacaacatgaacttcaccaagctgaagaacttcaccggcctgttcgagttctacaagctgctgtgcgtgagaggcatcatcaccagcaagaccaagagcctggacaagggctacaacaaggccctgaacgacctgtgcatcaaggtgaacaactgggacctgttcttcagccctagcgaggacaacttcaccaacgacctgaacaagggcgaggagatcaccagcgacaccaacatcgaggccgccgaggagaacatcagcctggacctgatccagcagtactacctgaccttcaacttcgacaacgagcctgagaacatcagcatcgagaacctgagcagcgacatcatcggccagctggagctgatgcctaacatcgagagattccctaacggcaagaagtacgagctggacaagtacaccatgttccactacctgagagcccaggagttcgagcacggcaagagcagaatcgccctgaccaacagcgtgaacgaggccctgctgaaccctagcagagtgtacaccttcttcagcagcgactacgtgaagaaggtgaacaaggccaccgaggccgccatgttcctgggctgggtggagcagctggtgtacgacttcaccgacgagaccagcgaggtgagcaccaccgacaagatcgccgacatcaccatcatcatcccttacatcggccctgccctgaacatcggcaacatgctgtacaaggacgacttcgtgggcgccctgatcttcagcggcgccgtgatcctgctggagttcatccctgagatcgccatccctgtgctgggcaccttcgccctggtgagctacatcgccaacaaggtgctgaccgtgcagaccatcgacaacgccctgagcaagagaaacgagaagtgggacgaggtgtacaagtacatcgtgaccaactggctggccaaggtgaacacccagatcgacctgatcagaaagaagatgaaggaggccctggagaaccaggccgaggccaccaaggccatcatcaactaccagtacaaccagtacaccgaggaggagaagaacaacatcaacttcaacatcgacgacctgagcagcaagctgaacgagagcatcaacaaggccatgatcaacatcaacaagttcctgaaccagtgcagcgtgagctacctgatgaacagcatgatcccttacggcgtgaagagactggaggacttcgacgccagcctgaaggacgccctgctgaagtacatctacgacaacagaggcaccctgatcggccaggtggacagactgaaggacaaggtgaacaacaccctgagcaccgacatccctttccagctgagcaagtacgtggacaaccagagactgctgagcaccttcaccgagtacatcaagaacatcatcaacaccagcatcctgaacctgagatacgagagcaaccacctgatcgacctgagcagatacgccagcaagatcaacatcggcagcaaggtgaacttcgaccctatcgacaagaaccagatccagctgttcaacctggagagcagcaagatcgaggtgatcctgaagaacgccatcgtgtacaacagcatgtacgagaacttcagcaccagcttctggatcagaatccctaagtacttcaacagcatcagcctgaacaacgagtacaccatcatcaactgcatggagaacaacagcggctggaaggtgagcctgaactacggcgagatcatctggaccctgcaggacacccaggagatcaagcagagagtggtgttcaagtacagccagatgatcaacatcagcgactacatcaacagatggatcttcgtgaccatcaccaacaacagactgaacaacagcaagatctacatcaacggcagactgatcgaccagaagcctatcagcaacctgggcaacatccacgccagcaacaacatcatgttcaagctggacggctgcagagacacccacagatacatctggatcaagtacttcaacctgttcgacaaggagctgaacgagaaggagatcaaggacctgtacgacaaccagagcaacagcggcatcctgaaggacttctggggcgactacctgcagtacgacaagccttactacatgctgaacctgtacgaccctaacaagtacgtggacgtgaacaacgtgggcatcagaggctacatgtacctgaagggccctagaggcagcgtgatgaccaccaacatctacctgaacagcagcctgtacagaggcaccaagttcatcatcaagaagtacgccagcggcaacaaggacaacatcgtgagaaacaacgacagagtgtacatcaacgtggtggtgaagaacaaggagtacagactggccaccaacgccagccaggccggcgtggagaagatcctgagcgccctggagatccctgacgtgggcaacctgagccaggtggtggtgatgaagagcaagaacgaccagggcatcaccaacaagtgcaagatgaacctgcaggacaacaacggcaacgacatcggcttcatcggcttccaccagttcaacaacatcgccaagctggtggccagcaactggtacaacagacagatcgagagaagcagcagaaccctgggctgcagctgggagttcatccctgtggacgacggctggggcgagagacctctgtga

SEQ ID NO: 78 - DNA, 3891 bp, Artificial Sequence
  BoNT/A, M. musculus-modified 3
atgccattcgtcaataagcagttcaattacaaagaccccgtgaatggagtggatatcgcctatattaaaatccctaacgctgggcagatgcagccagtcaaggcatttaaaattcataacaaaatctgggtcatcccagagcgagacaccttcaccaatcccgaggaaggagacctcaatcctcccccagaagcaaaacaggtgcctgtttcatactatgacagcacttacctgagcaccgacaatgaaaaagacaactacttgaaaggcgttaccaagcttttcgagcgtatctacagcaccgatcttgggaggatgctgctcacatctatcgttcgcggtatccccttctggggcggtagcactattgataccgaattgaaggtcatcgatactaactgcatcaacgtgattcaacccgacggaagctatcgcagcgaagagctgaatctggttatcattggcccctctgccgacattatccaatttgaatgtaaatcttttggtcacgaggtccttaatttgactcgcaacggttacgggagtacccagtatattcgcttcagcccagatttcacatttggcttcgaagagtcactggaggtcgatacaaaccctcttctcggggcagggaagttcgccaccgacccagctgtgacactggcccacgaactgatccatgccggccaccggctgtatggtatcgctatcaatcctaaccgagtgttcaaggtcaacacaaacgcttattacgagatgtctggactcgaggtgtcctttgaagagctgaggaccttcgggggccacgacgctaagtttattgactccctgcaggaaaatgagttccgcctttattactataacaagtttaaagatatcgcatctactctgaataaggctaaaagcatcgtgggtacaaccgccagtctccagtacatgaaaaacgtgttcaaggagaagtaccttctgtccgaagatactagtggtaagttttctgtcgacaagttgaagttcgacaagctttacaagatgctgaccgagatctacaccgaggataattttgtgaaatttttcaaagtgctgaacaggaagacctacctcaatttcgacaaggccgtgtttaagattaacatcgtgcctaaagtgaactacaccatttacgatgggtttaatttgcgcaacaccaacctggccgcaaacttcaacgggcagaacaccgagattaataacatgaattttacaaagctgaaaaactttaccggcctcttcgagttttacaagttgctgtgcgtccggggcatcattacaagcaagactaagtcactggataagggatataacaaagccctgaatgacctctgtattaaggtgaacaattgggatctgtttttcagccctagtgaagacaactttaccaacgatctgaacaagggagaggaaatcacaagcgataccaacattgaagccgctgaagagaacatcagcctggacctgatccagcaatactatctgacatttaatttcgacaacgaacccgaaaatattagcatcgagaacttgagcagtgacatcattggccaactggagctcatgccaaacatcgagcggttccccaacggtaagaaatatgagctggataaatacaccatgtttcattacctgagggcacaggaatttgaacatggcaaaagtagaatcgccctgaccaattccgtcaacgaggccctgttgaacccatctagagtgtacacttttttctcctctgactatgtgaaaaaggtgaacaaggctacagaggccgcaatgttcctcgggtgggtggagcagttggtctacgatttcactgatgagacttccgaagtcagcaccacagacaagattgcagacatcacaatcattatcccttacatcggcccagcccttaacatcggaaatatgctttataaggacgattttgtgggggccctgatcttctccggcgctgttattctgcttgagttcatccctgagatcgccatccctgtgctgggaacttttgctctggtgtcatatatcgctaacaaggtgctgactgttcagactatcgacaacgccctctcaaagcggaatgagaaatgggacgaagtttataaatacatcgtgactaattggctcgcaaaggtgaacacccaaatcgatctgattagaaagaaaatgaaagaggccctcgagaatcaggctgaggccaccaaagccattatcaattaccaatacaatcagtacaccgaggaagagaaaaataacatcaacttcaacatcgatgacctgtccagcaagcttaacgaatctatcaataaagctatgattaatattaacaagttcctgaaccagtgttcagtgtcctacctgatgaactccatgatcccctatggcgtcaagcggctggaggattttgatgcctccctcaaagacgcactgctcaaatacatctacgataaccgcggcacactgattggacaagtggatcgactcaaggacaaggttaataacactctgtccaccgatatcccatttcagctgtctaagtatgtggacaaccagaggctgttgtctacctttactgaatatatcaagaacattatcaatacatcaatcctgaatcttcggtatgagagcaatcacttgatcgacctctcacgctacgcttctaagatcaacatcggcagcaaagtgaattttgaccctatcgacaagaaccaaattcaactcttcaatctggaatcctcaaagatcgaagtgatccttaagaatgccatcgtgtataattccatgtacgaaaacttcagtaccagtttctggatcaggattcctaagtacttcaacagcatctctctgaataacgagtacacaatcattaactgtatggagaataacagtggatggaaagtcagcctgaactatggcgaaattatctggaccttgcaggatacacaggagatcaaacagagggtggttttcaagtactctcagatgatcaatatttccgattacatcaacagatggatctttgttacaattacaaacaatagactgaacaatagtaagatttacattaatggacgactgatcgatcagaagcctatctcaaacctgggcaatatccacgccagtaataacatcatgtttaagctcgacggttgcagggatacccacagatatatttggatcaagtacttcaacttgttcgacaaagagctgaacgagaaggagatcaaggatctttatgataatcagagcaattcagggattctcaaggacttctggggagactacctgcagtatgataagccatattacatgctgaacctgtatgaccccaataagtatgtcgacgtgaacaatgtcggaatccgtggttatatgtatctgaaaggacctcgggggtctgtgatgacaaccaatatctatctgaattcatccttgtacagagggactaaatttattatcaaaaagtacgcctctggcaacaaggacaatatcgtgcgtaataacgatagagtgtatatcaatgttgtggttaagaacaaagagtacaggcttgccacaaatgcttcccaggccggcgtggaaaaaatcttgagcgcactggaaattcctgacgtgggcaacctgtcccaggtggtcgtgatgaagtccaagaatgatcaagggattactaacaagtgcaaaatgaacctgcaggacaacaatggaaacgatatcggattcattggattccatcagttcaacaatattgctaaactggtggcaagcaactggtataaccgtcagatcgaaagaagtagccggaccctcggttgcagttgggagtttatccctgtcgacgacgggtggggcgagcgacccctctga

SEQ ID NO: 79 - DNA, 3891 bp, Artificial Sequence
  BoNT/A,  R. norvegicus-modified 1
atgcctttcgtgaataaacagttcaactacaaggaccctgttaacggcgtggacattgcgtacattaaaattccaaacgcaggacaaatgcagccagtcaaggctttcaaaatccacaacaagatctgggtgataccagaacgggacacgttcaccaaccccgaggaaggtgaccttaatccacccccagaggccaaacaggttcctgtatcatattacgactctacttacctctctacagacaacgaaaaagacaattacctaaaaggcgtgaccaagctgttcgagcgaatatactctactgatttagggcggatgctcctgacaagcatagtccggggaatacccttctgggggggcagtactatcgacactgagttgaaagtcatcgacactaactgcatcaacgtcattcagcccgacggcagctatagaagcgaggaactcaacctggtaattatcggccctagtgccgacataatccaatttgagtgcaagagctttgggcacgaggttttgaacctgacacggaacggctatggctcgacccagtatatccggttcagccccgatttcacgttcggatttgaggaatctcttgaagtggatacaaaccctctactgggcgcaggaaagttcgctacggaccccgcagttacactagctcacgagctcatccatgcaggtcacagactgtacggcatcgccattaaccccaatagggtcttcaaagtcaacaccaacgcctactatgaaatgagcggattggaagtgagtttcgaagagttacgtacatttggcgggcatgacgctaagtttatcgattccctccaggagaacgagtttcgcctgtactattacaacaagttcaaggacatagcctcaaccctcaacaaggcgaaatccatcgtggggaccacagccagtctgcaatatatgaagaacgttttcaaagagaagtaccttctatccgaggacacgtcaggcaagttttccgtcgacaagctgaagttcgacaaattgtataagatgttgactgagatctacacagaagacaacttcgtgaaattctttaaggtgctgaaccgcaaaacatacttgaacttcgacaaggctgtctttaagattaacattgtgccgaaggtaaattataccatatacgatgggttcaacctgaggaacaccaacctcgctgccaacttcaacggtcagaatactgagatcaacaatatgaacttcaccaagctcaagaattttacaggcctgtttgagttttacaagcttctgtgcgtccgtggaatcattacctctaaaacgaagtctttggacaagggttataacaaggctctgaatgacctgtgcatcaaagtgaataactgggaccttttcttttctccatcggaagacaacttcaccaatgacttaaataagggggaggaaattactagcgacacgaacatcgaggccgcagaggaaaatatatcactggaccttatccagcaatactatttgacctttaatttcgacaacgagcctgagaatataagtatcgagaatctttcctcagatattatcggacagctcgaactgatgcccaatatcgagcgcttccctaatggtaaaaagtacgagctcgataagtacacaatgttccactatttgcgcgcccaggagtttgagcacgggaagagcaggatcgcgcttacaaatagcgtgaacgaggcactcctgaatcctagtcgagtgtacacgttcttttctagcgattatgtcaagaaagtgaacaaagccaccgaggccgctatgtttttaggatgggtggaacagctggtatacgattttaccgacgagacctctgaagtcagcactacagataagattgccgatatcaccatcattatcccatatatcggaccggctctgaatatcgggaacatgctgtataaggacgattttgtgggcgcactgattttctctggcgctgtgatccttctcgagtttatccccgagatcgcaatcccggtgctgggtacttttgcgcttgtgtcctatatcgcaaacaaggtccttaccgtgcagacaattgataacgccctgtctaaacgcaacgagaaatgggacgaggtttacaaatacatcgtcaccaactggcttgctaaggtcaacacccagatcgatctgatccgcaagaaaatgaaagaagccctggaaaatcaggccgaggccaccaaggctatcataaattaccagtataaccagtacactgaagaggaaaaaaacaatattaacttcaacatcgacgatttgtccagcaagctgaacgagagtatcaataaggccatgatcaatatcaataagttcctgaatcaatgttcagtgtcctacctcatgaactccatgatcccatacggggtgaagcgtctggaagactttgacgcgtccctgaaggacgcactcctgaagtatatttatgataaccgaggcaccttgattggacaggttgatagactgaaggacaaagtgaacaatactttatctactgatatccctttccagttgagcaaatacgtggataaccagagattactgagcaccttcactgaatacattaaaaatattatcaacaccagtatccttaacctgaggtacgagtctaatcacctcatcgatctgtccagatacgccagcaagattaacattggatccaaagtgaacttcgaccctatcgacaaaaaccaaatccaactgtttaacttggagagctccaagatcgaggtgatcctcaagaatgccatagtctataattcgatgtacgaaaacttttccacttcattttggataaggatccccaagtatttcaactccatttccctcaacaatgagtacactatcattaactgcatggaaaataactctggttggaaagtctctctcaattacggagagatcatttggaccctgcaagatactcaggaaattaagcagcgcgtggtctttaagtactcccagatgatcaacattagtgattatattaaccgatggattttcgtcacaattaccaataaccgactgaacaatagcaaaatttacattaatgggaggctaatcgatcagaagcccatttcaaatctgggtaacatccacgcctccaacaatatcatgtttaagctggacggctgtcgtgacacccatagatatatatggatcaaatacttcaatctgtttgacaaggaactaaatgaaaaagagattaaagatctgtacgataatcagtcaaactccggtatcctcaaggatttctggggcgattacctgcagtacgacaagccctactatatgctgaatctctacgatcctaataagtatgtggatgtgaacaatgtcggtatccggggctacatgtacctgaaaggccctcgcggcagcgtcatgaccacaaatatctacctgaattcctctctctatagggggacaaagttcatcattaagaaatatgcttcggggaacaaggacaacattgttaggaataacgatagagtgtacatcaacgttgtagtgaagaacaaagagtatcggttggcaacgaacgccagccaggctggcgtggagaagatcctctcagctctggagataccagatgttggtaatctatctcaggtggtagtgatgaagagtaaaaacgaccagggcattaccaacaagtgtaagatgaacctccaggacaataacggcaacgatatcggattcatcggattccatcaattcaataacatcgctaaactggttgccagcaattggtataacaggcagattgagcgctcctcgagaacactcgggtgtagttgggaatttatcccggtagacgatggttggggagaacggccactatga

SEQ ID NO: 80 - DNA, 3891 bp, Artificial Sequence
  BoNT/A,  R. norvegicus-modified 2
atgcctttcgtgaacaagcagttcaactacaaggaccctgtgaacggcgtggacatcgcctacatcaagatccctaacgccggccagatgcagcctgtgaaggccttcaagatccacaacaagatctgggtgatccctgagagggacaccttcaccaaccctgaggagggcgacctgaaccctcctcctgaggccaagcaggtgcctgtgtcctactacgactccacctacctgtccaccgacaacgagaaggacaactacctgaagggcgtgaccaagctgttcgagaggatctactccaccgacctgggcaggatgctgctgacctccatcgtgaggggcatccctttctggggcggctccaccatcgacaccgagctgaaggtgatcgacaccaactgcatcaacgtgatccagcctgacggctcctacaggtccgaggagctgaacctggtgatcatcggcccttccgccgacatcatccagttcgagtgcaagtccttcggccacgaggtgctgaacctgaccaggaacggctacggctccacccagtacatcaggttctcccctgacttcaccttcggcttcgaggagtccctggaggtggacaccaaccctctgctgggcgccggcaagttcgccaccgaccctgccgtgaccctggcccacgagctgatccacgccggccacaggctgtacggcatcgccatcaaccctaacagggtgttcaaggtgaacaccaacgcctactacgagatgtccggcctggaggtgtccttcgaggagctgaggaccttcggcggccacgacgccaagttcatcgactccctgcaggagaacgagttcaggctgtactactacaacaagttcaaggacatcgcctccaccctgaacaaggccaagtccatcgtgggcaccaccgcctccctgcagtacatgaagaacgtgttcaaggagaagtacctgctgtccgaggacacctccggcaagttctccgtggacaagctgaagttcgacaagctgtacaagatgctgaccgagatctacaccgaggacaacttcgtgaagttcttcaaggtgctgaacaggaagacctacctgaacttcgacaaggccgtgttcaagatcaacatcgtgcctaaggtgaactacaccatctacgacggcttcaacctgaggaacaccaacctggccgccaacttcaacggccagaacaccgagatcaacaacatgaacttcaccaagctgaagaacttcaccggcctgttcgagttctacaagctgctgtgcgtgaggggcatcatcacctccaagaccaagtccctggacaagggctacaacaaggccctgaacgacctgtgcatcaaggtgaacaactgggacctgttcttctccccttccgaggacaacttcaccaacgacctgaacaagggcgaggagatcacctccgacaccaacatcgaggccgccgaggagaacatctccctggacctgatccagcagtactacctgaccttcaacttcgacaacgagcctgagaacatctccatcgagaacctgtcctccgacatcatcggccagctggagctgatgcctaacatcgagaggttccctaacggcaagaagtacgagctggacaagtacaccatgttccactacctgagggcccaggagttcgagcacggcaagtccaggatcgccctgaccaactccgtgaacgaggccctgctgaacccttccagggtgtacaccttcttctcctccgactacgtgaagaaggtgaacaaggccaccgaggccgccatgttcctgggctgggtggagcagctggtgtacgacttcaccgacgagacctccgaggtgtccaccaccgacaagatcgccgacatcaccatcatcatcccttacatcggccctgccctgaacatcggcaacatgctgtacaaggacgacttcgtgggcgccctgatcttctccggcgccgtgatcctgctggagttcatccctgagatcgccatccctgtgctgggcaccttcgccctggtgtcctacatcgccaacaaggtgctgaccgtgcagaccatcgacaacgccctgtccaagaggaacgagaagtgggacgaggtgtacaagtacatcgtgaccaactggctggccaaggtgaacacccagatcgacctgatcaggaagaagatgaaggaggccctggagaaccaggccgaggccaccaaggccatcatcaactaccagtacaaccagtacaccgaggaggagaagaacaacatcaacttcaacatcgacgacctgtcctccaagctgaacgagtccatcaacaaggccatgatcaacatcaacaagttcctgaaccagtgctccgtgtcctacctgatgaactccatgatcccttacggcgtgaagaggctggaggacttcgacgcctccctgaaggacgccctgctgaagtacatctacgacaacaggggcaccctgatcggccaggtggacaggctgaaggacaaggtgaacaacaccctgtccaccgacatccctttccagctgtccaagtacgtggacaaccagaggctgctgtccaccttcaccgagtacatcaagaacatcatcaacacctccatcctgaacctgaggtacgagtccaaccacctgatcgacctgtccaggtacgcctccaagatcaacatcggctccaaggtgaacttcgaccctatcgacaagaaccagatccagctgttcaacctggagtcctccaagatcgaggtgatcctgaagaacgccatcgtgtacaactccatgtacgagaacttctccacctccttctggatcaggatccctaagtacttcaactccatctccctgaacaacgagtacaccatcatcaactgcatggagaacaactccggctggaaggtgtccctgaactacggcgagatcatctggaccctgcaggacacccaggagatcaagcagagggtggtgttcaagtactcccagatgatcaacatctccgactacatcaacaggtggatcttcgtgaccatcaccaacaacaggctgaacaactccaagatctacatcaacggcaggctgatcgaccagaagcctatctccaacctgggcaacatccacgcctccaacaacatcatgttcaagctggacggctgcagggacacccacaggtacatctggatcaagtacttcaacctgttcgacaaggagctgaacgagaaggagatcaaggacctgtacgacaaccagtccaactccggcatcctgaaggacttctggggcgactacctgcagtacgacaagccttactacatgctgaacctgtacgaccctaacaagtacgtggacgtgaacaacgtgggcatcaggggctacatgtacctgaagggccctaggggctccgtgatgaccaccaacatctacctgaactcctccctgtacaggggcaccaagttcatcatcaagaagtacgcctccggcaacaaggacaacatcgtgaggaacaacgacagggtgtacatcaacgtggtggtgaagaacaaggagtacaggctggccaccaacgcctcccaggccggcgtggagaagatcctgtccgccctggagatccctgacgtgggcaacctgtcccaggtggtggtgatgaagtccaagaacgaccagggcatcaccaacaagtgcaagatgaacctgcaggacaacaacggcaacgacatcggcttcatcggcttccaccagttcaacaacatcgccaagctggtggcctccaactggtacaacaggcagatcgagaggtcctccaggaccctgggctgctcctgggagttcatccctgtggacgacggctggggcgagaggcctctgtga

SEQ ID NO: 81 - DNA, 3891 bp, Artificial Sequence
  BoNT/A,  R. norvegicus-modified 3
atgcctttcgtgaataaacagtttaactacaaggatcccgtgaacggagtggatatcgcctacatcaagatccctaacgccggccagatgcagcctgtgaaggctttcaaaatccataataagatctgggtgatccctgagagagacacatttaccaatccagaagagggtgacctgaacccaccccctgaagctaaacaggtcccagtttcttattacgactctacctatctctctaccgataacgagaaagacaattatctcaagggggtcacaaaactgttcgaaagaatctatagtaccgatctcggacgcatgttgctgacatcaatcgtgaggggaattcctttctggggcggttctactattgatactgagctcaaggttattgacaccaactgtattaacgtgatccagccagatggctcctaccgctcagaggaactgaacttggtcatcattggtccctctgccgatattatccagttcgaatgcaaatccttcggccacgaggtgctgaacctgacacggaacggttatgggagtacccagtacatccggttctcacccgacttcaccttcggctttgaagagtccctggaggttgacaccaacccacttctgggtgccgggaagtttgcaaccgatcccgccgtcaccctggctcacgagctgattcacgctggtcaccgactgtacgggatcgccattaaccccaacagggtgttcaaggtgaacactaacgcttactatgagatgagcggcctggaggtctcctttgaggaactgcgcaccttcggcgggcacgacgcaaagtttatcgatagtctgcaggagaacgagtttaggttgtactattacaacaaattcaaagacatcgcaagcactctgaataaggccaagtctattgttggtaccacagctagcctgcagtacatgaaaaacgtgtttaaggagaaataccttctgtctgaggacacaagcggaaagttcagcgttgacaaactgaaattcgataagttgtacaagatgttgaccgagatctatacagaggataacttcgtgaaattctttaaggtgctgaacagaaagacatatttgaacttcgacaaagccgtcttcaagatcaatattgtgcctaaggtgaattacacaatctacgacggcttcaacctgcgcaacaccaaccttgccgcaaacttcaatgggcagaacaccgagatcaataacatgaattttaccaaactcaagaactttactggactgttcgagttctataaactgctctgtgtgaggggaatcattacaagtaaaactaagagtctggacaaaggttacaacaaggcactgaatgatctttgtatcaaggtcaataactgggacctgttcttttccccctctgaagataacttcaccaacgacctgaacaaaggagaggaaatcaccagtgacactaatatcgaggccgctgaggaaaatatctcactggacctgatccagcagtattacctgaccttcaattttgataacgagcctgagaacatcagcatcgagaatctctccagcgacatcattggccagctggaattgatgcctaacatcgagcgcttccccaatggcaagaaatatgaactggataagtacactatgtttcactaccttagggcccaggagtttgaacacggcaaatctcgaattgcactgaccaattctgttaatgaggccctgcttaacccctcccgagtgtacacctttttcagctccgactatgtgaagaaagtcaataaagccacagaggccgcaatgttcctgggctgggtcgaacagctggtgtacgactttaccgatgaaactagcgaggtctccacaaccgataagatcgccgacatcaccatcattatcccttacattggacccgccttgaacattggtaacatgctctacaaggacgatttcgtcggcgccttgatttttagcggggccgtgatcctcctggagtttatccctgaaattgctatccccgtgttgggcaccttcgctcttgtctcatacatcgccaataaagtgctgaccgtgcagaccatcgataacgctctgtccaagaggaatgaaaaatgggacgaggtgtacaagtacatcgtcaccaactggctcgcaaaggtgaacacccagattgatctgatcaggaaaaagatgaaggaggccctggaaaaccaggcagaggccacaaaagctatcattaactatcagtataaccagtatactgaagaggaaaaaaacaatattaacttcaacatcgacgatctgtccagtaagctgaacgaatccatcaataaggccatgatcaacattaataagtttctgaatcagtgctcagtgtcctatctcatgaattccatgatcccatacggagtgaagagactggaagactttgacgccagcctgaaggacgctctcctgaagtacatctacgataacagaggcactctgatcgggcaggtggatcgtctgaaggacaaggtgaacaatactctgagcacagacattccattccagctctccaaatacgtggataatcagcgacttctgagcaccttcaccgagtacatcaagaacatcattaacacttccatcctcaacctgcgatacgagagcaaccatttgatcgatctgagccgttacgcctcaaaaattaatatcggttccaaggtgaatttcgacccaattgacaagaatcagatccagctctttaacctggagagctctaagatcgaggtcattctcaagaacgctatcgtgtataacagcatgtatgaaaattttagcacttccttctggatccggatccccaagtatttcaattccatcagtctcaacaatgagtacaccatcattaattgcatggaaaacaattccggatggaaggtttcactgaactacggagagattatctggacactccaggacactcaggaaattaagcagcgggtggtttttaagtactctcagatgattaacatctctgactacatcaaccggtggatttttgtgacaatcaccaataacagactcaacaattccaaaatctatatcaacggtcgccttatcgaccagaagcctatctctaacttgggcaatatccatgcctccaataacattatgttcaaacttgatggatgccgcgacacccaccggtatatttggattaagtacttcaacctgtttgacaaagagctgaacgagaaggagatcaaggacctctacgataatcagtcaaactctgggatcttgaaagacttttggggcgactatcttcagtacgataagccttattacatgctcaatctttacgatccaaacaaatatgtggacgtcaacaatgtgggcattagagggtatatgtatctgaagggcccacgtggcagcgttatgacaactaatatttacctgaattccagtctgtacagagggaccaagttcatcattaagaaatatgcatccggaaacaaggacaatatcgtgaggaacaatgatagggtctatatcaacgtcgtggtcaagaacaaagaataccgcctggccactaatgcttctcaggcaggagtggaaaagatcctctctgctctggagatccctgacgttggtaatctcagccaggtggttgtcatgaaatccaagaatgatcaggggatcacaaacaaatgcaagatgaatttgcaggataataacggcaacgacatcgggtttatcggatttcatcagttcaacaatatcgctaagcttgtcgcctccaactggtacaaccggcagatcgagcgcagttcacggaccctcggctgtagttgggaattcatccctgtggatgacgggtggggcgaacgtcctctgtga

SEQ ID NO: 82 - DNA, 3891 bp, Artificial Sequence
  BoNT/A,  C. griseus-modified 1
atgccattcgtgaacaagcagttcaattataaagatcccgtgaacggggtggacattgcctatattaaaatcccaaacgcagggcagatgcagcccgtcaaagccttcaaaatccataacaagatctgggtgattcccgagagagatacgttcaccaaccctgaggaaggagatctgaatccgccccctgaagccaagcaagtcccagtttcctactatgatagcacctatctgtctaccgacaacgagaaggataattatctaaagggcgtgactaaactttttgagcgtatctactctaccgatcttggtcgaatgctgctcacttcaattgttaggggtatacccttctggggtggaagcactatcgacaccgagttgaaggtgatcgacacgaactgcattaatgtaatccagcctgatggatcctacaggagtgaggaactcaacctggtgattatcggcccttctgccgacatcattcagtttgaatgcaagagttttggtcacgaggtcctcaatctaacccggaatgggtatggcagcacccagtacattagattcagccctgacttcactttcggatttgaagagagtctagaggtcgacaccaacccactgttgggggccggcaagttcgccacagaccctgctgtcacacttgcgcatgaactgattcacgccggacaccgtctgtacggcattgctatcaatcccaatcgtgtattcaaggtgaacaccaatgcatactatgaaatgagcgggcttgaggtgtcctttgaggaacttagaacatttggtgggcacgatgcaaaatttatagactctttgcaagaaaacgagttcaggctgtactattacaataagttcaaggacatcgcttcaactctgaataaggctaagtctattgtcggtacaactgcaagcctgcagtacatgaagaatgtgttcaaagagaaatacctcttgtctgaagacacttctggaaaattctctgtggacaagctgaagttcgacaaactgtacaaaatgttgacagagatatatacagaagacaattttgtgaaatttttcaaggtcttgaatagaaagacctacctcaatttcgacaaggctgtctttaagattaacatagtgccaaaagtcaactacactatctacgatggatttaatttacgcaacaccaatctagcagccaacttcaacggacagaataccgaaatcaataacatgaattttaccaagctgaagaacttcacgggcttatttgagttttacaaactgctctgcgtccggggcatcattacgagtaagactaagagcctggataagggctacaacaaggctctgaatgacttgtgtatcaaagtaaataactgggatctcttctttagtccaagtgaggataactttacaaatgacttgaataaaggagaggaaatcacctctgatacaaacattgaggccgctgaggaaaatatcagtttagatttgattcagcaatattaccttaccttcaacttcgacaacgagcccgagaacatctcaatcgaaaacttgtcgagcgacattatcggacaactcgagctgatgccaaacattgaacgttttcctaatggcaaaaagtatgaactcgataaatacaccatgtttcattacctgcgagctcaggagttcgaacatggcaagtcacgcattgccctgacaaactctgtcaacgaagcactattgaacccctcacgcgtgtacaccttcttttctagcgattatgttaagaaagtgaacaaagctactgaggccgcaatgtttctgggatgggttgagcagctcgtatatgatttcactgacgagacctctgaggtgtcaacaaccgataagatcgccgatatcactattatcattccatacataggccccgcgctaaatataggcaacatgttgtacaaagacgatttcgtcggggcgctaatcttcagcggagcagtgatcctgttggaatttatccctgaaattgcaatcccggttcttggcaccttcgccttggtgtcctatatcgctaataaagttctgaccgtacagaccatcgacaatgctctgtctaaacgcaacgagaagtgggacgaagtgtataaatacatcgtgaccaactggctggccaaggtaaatactcagattgatctgatcaggaagaaaatgaaagaggccttagagaaccaggctgaagccactaaggctatcataaattaccagtacaatcagtacacagaagaggaaaagaataacataaattttaacattgatgacttgagttccaagcttaacgagagcatcaacaaagcgatgatcaacatcaacaaattcctcaatcagtgtagcgtgtcttacttaatgaattccatgattccttacggcgtcaagagactggaggactttgatgcttcactgaaggatgcactactgaaatacatatatgataaccgagggacattaatcgggcaggttgacaggctgaaggacaaggtgaataacactctctcaacggacatcccttttcaactaagcaagtatgttgacaaccagagactgctcagtacatttacagagtatatcaagaacatcattaacaccagtattctgaacctgcggtacgagtccaatcacctcatcgacctgtccaggtacgcttccaaaattaacattggttccaaggttaatttcgatccaattgacaagaaccagatacaactttttaaccttgagtcgagcaaaattgaggttatccttaaaaacgctatcgtttataattcaatgtacgaaaattttagtacaagcttctggatccgaataccaaagtattttaactccatttctctcaacaatgagtacaccataatcaattgcatggaaaacaattcaggatggaaagtatctctcaattatggtgaaataatctggacactgcaggatactcaggagatcaaacaacgtgtggttttcaagtattcccagatgatcaacatctcagattatatcaaccgctggatctttgtgacgatcaccaacaatagactgaataacagcaagatttatattaatggtcggttaatcgaccagaagcccatttcgaatcttggcaatatccacgcctccaataacatcatgttcaagctcgacggatgccgcgacacacatagatatatttggatcaagtacttcaaccttttcgataaggagctgaacgaaaaggaaatcaaggatctttatgacaatcagtccaactcaggcatcctgaaggatttttggggcgattacttgcagtatgataagccatactatatgctgaacctgtacgatcccaataaatatgttgatgtaaacaatgtgggcattcgcggatatatgtacctgaagggtccccgcggttccgtgatgactacaaacatatatctgaacagctccctctaccgggggactaagtttattatcaagaaatacgcttccggcaacaaagacaacattgtaaggaacaatgaccgagtgtacattaatgtcgtggtcaaaaataaggaatatcggctcgcaacaaatgccagccaggcaggcgtcgagaagatcctgagtgccctcgagatacctgacgtcggtaacctctcccaggtggtggtgatgaaatccaagaacgaccagggtatcaccaacaagtgtaaaatgaatcttcaagacaataacgggaatgacattgggtttattgggttccaccagtttaataacatagccaagctggtggcatctaactggtataaccggcaaatcgagcgatcgtctcggacactgggctgtagttgggagttcattccggtggatgatggctggggagagaggcctctgtga

SEQ ID NO: 83 - DNA, 3891 bp, Artificial Sequence
  BoNT/A,  C. griseus-modified 2
atgcctttcgtgaacaagcagttcaactacaaggaccctgtgaacggcgtggacatcgcctacatcaagatccctaacgccggccagatgcagcctgtgaaggccttcaagatccacaacaagatctgggtgatccctgagagagacaccttcaccaaccctgaggagggcgacctgaaccctcctcctgaggccaagcaggtgcctgtgtcctactacgactccacctacctgtccaccgacaacgagaaggacaactacctgaagggcgtgaccaagctgttcgagagaatctactccaccgacctgggcagaatgctgctgacctccatcgtgagaggcatccctttctggggcggctccaccatcgacaccgagctgaaggtgatcgacaccaactgcatcaacgtgatccagcctgacggctcctacagatccgaggagctgaacctggtgatcatcggcccttccgccgacatcatccagttcgagtgcaagtccttcggccacgaggtgctgaacctgaccagaaacggctacggctccacccagtacatcagattctcccctgacttcaccttcggcttcgaggagtccctggaggtggacaccaaccctctgctgggcgccggcaagttcgccaccgaccctgccgtgaccctggcccacgagctgatccacgccggccacagactgtacggcatcgccatcaaccctaacagagtgttcaaggtgaacaccaacgcctactacgagatgtccggcctggaggtgtccttcgaggagctgagaaccttcggcggccacgacgccaagttcatcgactccctgcaggagaacgagttcagactgtactactacaacaagttcaaggacatcgcctccaccctgaacaaggccaagtccatcgtgggcaccaccgcctccctgcagtacatgaagaacgtgttcaaggagaagtacctgctgtccgaggacacctccggcaagttctccgtggacaagctgaagttcgacaagctgtacaagatgctgaccgagatctacaccgaggacaacttcgtgaagttcttcaaggtgctgaacagaaagacctacctgaacttcgacaaggccgtgttcaagatcaacatcgtgcctaaggtgaactacaccatctacgacggcttcaacctgagaaacaccaacctggccgccaacttcaacggccagaacaccgagatcaacaacatgaacttcaccaagctgaagaacttcaccggcctgttcgagttctacaagctgctgtgcgtgagaggcatcatcacctccaagaccaagtccctggacaagggctacaacaaggccctgaacgacctgtgcatcaaggtgaacaactgggacctgttcttctccccttccgaggacaacttcaccaacgacctgaacaagggcgaggagatcacctccgacaccaacatcgaggccgccgaggagaacatctccctggacctgatccagcagtactacctgaccttcaacttcgacaacgagcctgagaacatctccatcgagaacctgtcctccgacatcatcggccagctggagctgatgcctaacatcgagagattccctaacggcaagaagtacgagctggacaagtacaccatgttccactacctgagagcccaggagttcgagcacggcaagtccagaatcgccctgaccaactccgtgaacgaggccctgctgaacccttccagagtgtacaccttcttctcctccgactacgtgaagaaggtgaacaaggccaccgaggccgccatgttcctgggctgggtggagcagctggtgtacgacttcaccgacgagacctccgaggtgtccaccaccgacaagatcgccgacatcaccatcatcatcccttacatcggccctgccctgaacatcggcaacatgctgtacaaggacgacttcgtgggcgccctgatcttctccggcgccgtgatcctgctggagttcatccctgagatcgccatccctgtgctgggcaccttcgccctggtgtcctacatcgccaacaaggtgctgaccgtgcagaccatcgacaacgccctgtccaagagaaacgagaagtgggacgaggtgtacaagtacatcgtgaccaactggctggccaaggtgaacacccagatcgacctgatcagaaagaagatgaaggaggccctggagaaccaggccgaggccaccaaggccatcatcaactaccagtacaaccagtacaccgaggaggagaagaacaacatcaacttcaacatcgacgacctgtcctccaagctgaacgagtccatcaacaaggccatgatcaacatcaacaagttcctgaaccagtgctccgtgtcctacctgatgaactccatgatcccttacggcgtgaagagactggaggacttcgacgcctccctgaaggacgccctgctgaagtacatctacgacaacagaggcaccctgatcggccaggtggacagactgaaggacaaggtgaacaacaccctgtccaccgacatccctttccagctgtccaagtacgtggacaaccagagactgctgtccaccttcaccgagtacatcaagaacatcatcaacacctccatcctgaacctgagatacgagtccaaccacctgatcgacctgtccagatacgcctccaagatcaacatcggctccaaggtgaacttcgaccctatcgacaagaaccagatccagctgttcaacctggagtcctccaagatcgaggtgatcctgaagaacgccatcgtgtacaactccatgtacgagaacttctccacctccttctggatcagaatccctaagtacttcaactccatctccctgaacaacgagtacaccatcatcaactgcatggagaacaactccggctggaaggtgtccctgaactacggcgagatcatctggaccctgcaggacacccaggagatcaagcagagagtggtgttcaagtactcccagatgatcaacatctccgactacatcaacagatggatcttcgtgaccatcaccaacaacagactgaacaactccaagatctacatcaacggcagactgatcgaccagaagcctatctccaacctgggcaacatccacgcctccaacaacatcatgttcaagctggacggctgcagagacacccacagatacatctggatcaagtacttcaacctgttcgacaaggagctgaacgagaaggagatcaaggacctgtacgacaaccagtccaactccggcatcctgaaggacttctggggcgactacctgcagtacgacaagccttactacatgctgaacctgtacgaccctaacaagtacgtggacgtgaacaacgtgggcatcagaggctacatgtacctgaagggccctagaggctccgtgatgaccaccaacatctacctgaactcctccctgtacagaggcaccaagttcatcatcaagaagtacgcctccggcaacaaggacaacatcgtgagaaacaacgacagagtgtacatcaacgtggtggtgaagaacaaggagtacagactggccaccaacgcctcccaggccggcgtggagaagatcctgtccgccctggagatccctgacgtgggcaacctgtcccaggtggtggtgatgaagtccaagaacgaccagggcatcaccaacaagtgcaagatgaacctgcaggacaacaacggcaacgacatcggcttcatcggcttccaccagttcaacaacatcgccaagctggtggcctccaactggtacaacagacagatcgagagatcctccagaaccctgggctgctcctgggagttcatccctgtggacgacggctggggcgagagacctctgtga

SEQ ID NO: 84 - DNA, 3891 bp, Artificial Sequence
  BoNT/A,  C. griseus-modified 3
atgcccttcgtgaacaagcagttcaactacaaagaccccgtgaatggcgtggatatcgcttatatcaagattccaaacgctggacagatgcagcccgtcaaagccttcaagatccataataaaatctgggtgatccctgaaagggacacctttaccaacccagaagagggcgatctgaaccctccacctgaagcaaaacaggtgccagtttcttattacgactcaacctacttgagtacagacaatgaaaaagataattatctgaagggcgttaccaagcttttcgagcgtatctatagcaccgacctgggaagaatgctccttacaagtatcgtgagaggtatccctttttggggtgggtctaccatcgatactgaactcaaagtgatcgacaccaactgtattaacgtgattcagcccgatggcagttacaggtccgaagagctgaatctcgtgatcattggaccttctgccgatatcattcagtttgaatgcaaatcctttggccacgaggtgctgaacctgacaagaaacggctatggatctactcagtacattagattttctccagacttcactttcgggtttgaggaatccctggaggtggacaccaacccacttctcggcgcaggcaaattcgcaactgatcctgccgtgacccttgcccatgagctgatccacgccgggcatcgactctatggaattgcaatcaaccccaatcgagtgtttaaggtgaatactaacgcttattacgagatgagtgggctggaggtgtctttcgaggaactgaggacattcggaggtcacgacgcaaagttcattgacagcctgcaggagaacgagtttcgcctgtactattacaataagtttaaggacatcgcttcaaccctgaataaagccaagagcatcgtcgggaccacagcttccctgcagtacatgaaaaatgtgttcaaagagaaatacctcctgtccgaagatacctccggcaagttctccgtggacaagctgaaatttgacaagctctataagatgctgactgagatctataccgaggacaactttgtgaagttctttaaagttttgaatcgcaaaacctacttgaattttgataaagctgtgttcaagattaacattgtgcccaaggtgaattataccatctacgacggtttcaacctgcgtaataccaacctggccgctaactttaatggtcagaacactgaaatcaataacatgaacttcaccaagctgaaaaattttactggccttttcgagttctacaaactgctctgcgtgaggggaattatcacctccaagaccaaatccttggataaaggatataacaaggctctgaacgatctttgcattaaagtgaacaattgggacctgttcttttctccaagtgaagacaactttacaaacgaccttaacaagggggaagagattacaagcgacacaaatatcgaggccgctgaggaaaacatcagtctggatctgatccagcagtactatctgacattcaacttcgataacgagcctgaaaacattagtattgagaatttgtccagcgacattatcggacagcttgagctgatgcctaatatcgagcggtttccaaacggtaagaaatatgagcttgataagtacaccatgtttcactaccttagggcccaggagttcgagcacggcaaatctcgaattgccctgaccaactccgttaacgaggccctgctcaatccttccagagtctacaccttctttagctccgattacgtcaagaaagttaataaagctacagaggccgcaatgttcttgggatgggtcgagcagctggtctacgattttacagatgagacctccgaggtctcaactaccgacaagattgctgatatcacaattatcattccctacatcgggcccgccctgaatatcggcaatatgctgtacaaggacgatttcgttggcgcattgatttttagcggcgctgtgatcctgctcgagttcatccccgagattgccattcctgtccttggtacatttgcactggtgtcatatatcgctaacaaagtgctgaccgtccagactatcgacaacgcactgtctaagcgcaacgaaaagtgggatgaagtctataagtatatcgtgactaactggctcgcaaaagttaacacacagatcgatctgatccgcaagaaaatgaaagaagccctcgagaatcaggctgaagccaccaaggctatcattaattatcagtacaatcagtacactgaggaagagaagaataacatcaatttcaacatcgacgatctctctagtaaactgaacgaatccatcaacaaggccatgatcaatatcaacaagtttctcaatcagtgttcagtgtcctacctgatgaacagcatgatcccttatggagtgaagcgactggaagacttcgacgcctccctgaaggacgcacttttgaaatacatttatgataatcgaggaacactgattggacaggtggacagactgaaagacaaggtgaacaatactctctctactgacatcccttttcagctgtccaagtacgttgacaaccagcgcctgctttctacatttacagagtatattaagaatatcattaataccagcatcctgaacttgaggtacgaaagcaaccacctgattgatctgtcacggtatgccagcaagatcaatatcgggagcaaggtcaatttcgaccccatcgataagaatcagattcagctgtttaacttggagagctcaaagatcgaggtgatcctgaagaatgcaattgtgtataatagcatgtacgagaacttcagtacttcattctggatccgtatccccaagtatttcaactccatctcactcaataacgaatacaccatcattaattgcatggagaacaattctggatggaaggtctcacttaattatggcgaaatcatttggactctgcaggatactcaggaaatcaaacagagggtcgtgtttaagtacagtcagatgatcaatatctccgattatatcaaccggtggatttttgtcacaatcaccaacaatcgattgaacaattccaagatctacattaacggtcgcttgatcgaccagaaacctatctccaatctggggaatattcacgcatctaacaatattatgttcaagctcgatggctgtcgggatacacatagatacatctggatcaagtatttcaatctcttcgataaagaactgaacgagaaggaaattaaggatctgtacgacaaccagtcaaacagtggaattctgaaggacttctggggtgattatctgcagtatgacaaaccttattacatgctcaacttgtatgatcccaataaatacgtggacgttaacaatgttggtatccggggctacatgtatctgaagggtccacgcgggagtgtcatgaccactaacatctacctgaatagctctctttacagagggaccaagtttatcattaagaaatacgccagcgggaataaggataatatcgtgcgtaacaatgatcgggtgtacatcaacgttgtcgttaagaataaggaatatcgcttggccaccaacgctagccaggccggtgtggagaagattctgtccgccctggagatcccagacgtgggcaacctctcacaggtcgtggttatgaaatctaagaacgatcagggcattacaaacaagtgtaagatgaacttgcaggacaacaatggtaatgatatcggctttatcgggtttcatcagtttaataacatcgctaaactggtggccagcaactggtacaacaggcagatcgaacggagttctcggaccttgggctgctcttgggaattcatcccagtggacgacggatggggcgagcgtcctctctga

SEQ ID NO: 85 - DNA, 3891 bp, Artificial Sequence
  BoNT/A,  S. scrofa-modified 1
atgcccttcgtgaacaaacagttcaactacaaggacccggtcaatggagtcgacatagcctatatcaagatccccaacgcgggccagatgcaacccgtcaaggcattcaagatccacaataagatttgggtgattcccgagagagacacatttactaaccctgaggaaggcgacctcaaccccccacccgaagctaagcaggttccagtctcatattacgacagcacttacctgagcactgacaacgaaaaagacaattacctaaaaggagttaccaagctgttcgagagaatttactccacagatctcggcagaatgctgctcacaagcatcgtccgtggcatcccattctgggggggaagcactatcgacaccgagttgaaagtgatagacaccaactgtataaacgttatccagcctgacggctcctatcgctccgaagagctaaacttggttattatcggcccatccgctgatataattcagtttgagtgcaagagctttggacacgaggtcttgaatctgaccaggaatggctatgggtccacccagtacattcggttttctccggacttcacgttcggcttcgaagagtccctcgaagtggacacaaaccccctgcttggggccggcaagttcgccactgatcctgccgtgaccttagcccacgaactcatccatgccgggcaccggctctacggcatagcaatcaatccgaaccgggtgtttaaagtaaacaccaatgcgtactatgaaatgagcgggttggaagtctccttcgaggaactgcgcaccttcggcgggcacgacgcgaaattcatcgactccctccaggaaaatgagttccgtctgtactattacaataaattcaaggacatcgcctcaaccttaaacaaagctaaaagtattgtcggtaccactgcttccctgcagtatatgaagaatgtttttaaggagaagtatctgctttcagaagatactagcgggaaattcagcgtggataagctcaaattcgataaactctataagatgctgaccgagatctacactgaggacaatttcgtgaagtttttcaaggtgctgaatcgcaaaacgtatctcaattttgataaagccgtgtttaagatcaatattgttcctaaggtcaattatacgatctacgatggatttaatcttcggaacacgaatcttgccgctaacttcaacggtcagaacactgaaataaacaatatgaacttcaccaaactgaagaattttacagggttgttcgagttctacaagctgctctgtgtgcgagggattatcacaagtaagactaagtctcttgacaaaggctataacaaggctctgaatgacctgtgcatcaaggtgaacaattgggacctgttctttagtccgtctgaggacaacttcaccaatgacctgaacaagggtgaggaaataacgtcggacacaaacatagaagccgcggaagagaatatctccttggatctgatccagcaatactatctcaccttcaacttcgataacgagcccgagaatatctcgattgagaacctttcttcagatatcattggacagctggaactgatgccaaacatcgagcgctttccaaatggcaaaaagtacgaactggacaaatacacaatgttccactatctgagggcgcaagaattcgagcatggcaagagccgaatagctctcacaaacagtgtgaacgaggcactgctcaatcccagtcgggtatacaccttctttagctccgactacgtgaaaaaggtgaacaaggcgacagaggcagctatgttccttggttgggtcgagcagctggtgtatgatttcaccgacgagacaagcgaagttagcaccacggataaaatcgcagacatcacgataattataccgtacatcgggccagccctcaatatcggtaacatgctgtacaaagacgattttgtcggcgctctcatcttctccggagccgtgatcttgctagaattcatccccgagattgccatccctgtcctgggcaccttcgccttagtaagttatattgccaataaggtgttgaccgtccagaccatcgataacgccttaagtaagaggaatgaaaagtgggacgaggtttacaaatatatagtgacgaattggctggccaaggtgaacacccaaatcgatctgatccgaaaaaagatgaaggaagccctggagaaccaggccgaggcaaccaaggctattatcaactaccagtacaaccagtacacagaggaagagaaaaacaatatcaactttaacatcgacgatctctccagcaagctgaacgagagcattaacaaggccatgatcaatatcaataagtttctgaatcagtgcagtgtgtcatacctgatgaactcaatgattccatacggcgtcaagcggctcgaggatttcgatgcctctctcaaggacgcactcttaaaatatatctacgacaacagaggtacactaataggtcaggtggatcggctgaaagacaaggtgaacaatacgctgagcacggacattcccttccagctgtcaaagtacgtcgacaatcagcgcctgctttctacatttaccgagtacatcaaaaacattatcaatactagcatcctgaacctcaggtacgagtcgaaccatttgatcgacctttctaggtatgcaagcaaaattaatataggatctaaagtcaactttgaccctatcgacaagaatcaaatccagttatttaacctggaatcctctaagattgaagttattctgaaaaatgcgatcgtctacaatagcatgtatgagaactttagtaccagcttttggattaggatccccaaatacttcaactctattagcctgaataacgagtacaccataatcaactgcatggagaacaattctgggtggaaggtgtcgctaaattacggcgagataatctggaccctgcaggacacccaggagatcaaacaaagagtggtattcaagtatagccagatgatcaacatctccgattatatcaacagatggatctttgtgaccatcaccaacaatagacttaacaattccaagatctatattaacggacgtctgattgatcaaaagccaattagtaaccttggtaacatccatgcttccaacaatattatgttcaaactcgatggctgcagggacactcacaggtacatttggattaagtacttcaacttgtttgacaaggagctcaatgagaaggagatcaaagatctgtacgataaccagtcgaactcaggcattctgaaagacttctggggggactatctgcaatacgataagccttattacatgctgaacctttacgatcccaacaagtacgtggacgtgaacaatgttggaattagaggttatatgtacctgaaaggacctcgaggaagcgtgatgactacaaatatttacctcaactcttccctatacaggggcactaagttcatcattaaaaagtacgcatcaggaaataaggataacatcgtgcgcaacaatgaccgcgtctacatcaatgtggtagtgaagaacaaggaataccggctggccaccaacgccagccaggccggcgtcgagaagatcctgtctgctctggaaatccccgatgtcgggaacttgagtcaggtggtagtgatgaagtccaagaacgaccaggggattactaacaaatgcaaaatgaacctccaagataacaatgggaacgacatcggctttatcggcttccaccagtttaacaacattgcaaagttggtggcttcaaactggtataaccgccagatcgagcgatcctctcgcacacttgggtgttcctgggagtttatccctgtggatgacggatggggagagcggcctttgtga

SEQ ID NO: 86 - DNA, 3891 bp, Artificial Sequence
  BoNT/A,  S. scrofa-modified 2
atgcccttcgtgaacaagcagttcaactacaaggaccccgtgaacggcgtggacatcgcctacatcaagatccccaacgccggccagatgcagcccgtgaaggccttcaagatccacaacaagatctgggtgatccccgagagggacaccttcaccaaccccgaggagggcgacctgaaccccccccccgaggccaagcaggtgcccgtgagctactacgacagcacctacctgagcaccgacaacgagaaggacaactacctgaagggcgtgaccaagctgttcgagaggatctacagcaccgacctgggcaggatgctgctgaccagcatcgtgaggggcatccccttctggggcggcagcaccatcgacaccgagctgaaggtgatcgacaccaactgcatcaacgtgatccagcccgacggcagctacaggagcgaggagctgaacctggtgatcatcggccccagcgccgacatcatccagttcgagtgcaagagcttcggccacgaggtgctgaacctgaccaggaacggctacggcagcacccagtacatcaggttcagccccgacttcaccttcggcttcgaggagagcctggaggtggacaccaaccccctgctgggcgccggcaagttcgccaccgaccccgccgtgaccctggcccacgagctgatccacgccggccacaggctgtacggcatcgccatcaaccccaacagggtgttcaaggtgaacaccaacgcctactacgagatgagcggcctggaggtgagcttcgaggagctgaggaccttcggcggccacgacgccaagttcatcgacagcctgcaggagaacgagttcaggctgtactactacaacaagttcaaggacatcgccagcaccctgaacaaggccaagagcatcgtgggcaccaccgccagcctgcagtacatgaagaacgtgttcaaggagaagtacctgctgagcgaggacaccagcggcaagttcagcgtggacaagctgaagttcgacaagctgtacaagatgctgaccgagatctacaccgaggacaacttcgtgaagttcttcaaggtgctgaacaggaagacctacctgaacttcgacaaggccgtgttcaagatcaacatcgtgcccaaggtgaactacaccatctacgacggcttcaacctgaggaacaccaacctggccgccaacttcaacggccagaacaccgagatcaacaacatgaacttcaccaagctgaagaacttcaccggcctgttcgagttctacaagctgctgtgcgtgaggggcatcatcaccagcaagaccaagagcctggacaagggctacaacaaggccctgaacgacctgtgcatcaaggtgaacaactgggacctgttcttcagccccagcgaggacaacttcaccaacgacctgaacaagggcgaggagatcaccagcgacaccaacatcgaggccgccgaggagaacatcagcctggacctgatccagcagtactacctgaccttcaacttcgacaacgagcccgagaacatcagcatcgagaacctgagcagcgacatcatcggccagctggagctgatgcccaacatcgagaggttccccaacggcaagaagtacgagctggacaagtacaccatgttccactacctgagggcccaggagttcgagcacggcaagagcaggatcgccctgaccaacagcgtgaacgaggccctgctgaaccccagcagggtgtacaccttcttcagcagcgactacgtgaagaaggtgaacaaggccaccgaggccgccatgttcctgggctgggtggagcagctggtgtacgacttcaccgacgagaccagcgaggtgagcaccaccgacaagatcgccgacatcaccatcatcatcccctacatcggccccgccctgaacatcggcaacatgctgtacaaggacgacttcgtgggcgccctgatcttcagcggcgccgtgatcctgctggagttcatccccgagatcgccatccccgtgctgggcaccttcgccctggtgagctacatcgccaacaaggtgctgaccgtgcagaccatcgacaacgccctgagcaagaggaacgagaagtgggacgaggtgtacaagtacatcgtgaccaactggctggccaaggtgaacacccagatcgacctgatcaggaagaagatgaaggaggccctggagaaccaggccgaggccaccaaggccatcatcaactaccagtacaaccagtacaccgaggaggagaagaacaacatcaacttcaacatcgacgacctgagcagcaagctgaacgagagcatcaacaaggccatgatcaacatcaacaagttcctgaaccagtgcagcgtgagctacctgatgaacagcatgatcccctacggcgtgaagaggctggaggacttcgacgccagcctgaaggacgccctgctgaagtacatctacgacaacaggggcaccctgatcggccaggtggacaggctgaaggacaaggtgaacaacaccctgagcaccgacatccccttccagctgagcaagtacgtggacaaccagaggctgctgagcaccttcaccgagtacatcaagaacatcatcaacaccagcatcctgaacctgaggtacgagagcaaccacctgatcgacctgagcaggtacgccagcaagatcaacatcggcagcaaggtgaacttcgaccccatcgacaagaaccagatccagctgttcaacctggagagcagcaagatcgaggtgatcctgaagaacgccatcgtgtacaacagcatgtacgagaacttcagcaccagcttctggatcaggatccccaagtacttcaacagcatcagcctgaacaacgagtacaccatcatcaactgcatggagaacaacagcggctggaaggtgagcctgaactacggcgagatcatctggaccctgcaggacacccaggagatcaagcagagggtggtgttcaagtacagccagatgatcaacatcagcgactacatcaacaggtggatcttcgtgaccatcaccaacaacaggctgaacaacagcaagatctacatcaacggcaggctgatcgaccagaagcccatcagcaacctgggcaacatccacgccagcaacaacatcatgttcaagctggacggctgcagggacacccacaggtacatctggatcaagtacttcaacctgttcgacaaggagctgaacgagaaggagatcaaggacctgtacgacaaccagagcaacagcggcatcctgaaggacttctggggcgactacctgcagtacgacaagccctactacatgctgaacctgtacgaccccaacaagtacgtggacgtgaacaacgtgggcatcaggggctacatgtacctgaagggccccaggggcagcgtgatgaccaccaacatctacctgaacagcagcctgtacaggggcaccaagttcatcatcaagaagtacgccagcggcaacaaggacaacatcgtgaggaacaacgacagggtgtacatcaacgtggtggtgaagaacaaggagtacaggctggccaccaacgccagccaggccggcgtggagaagatcctgagcgccctggagatccccgacgtgggcaacctgagccaggtggtggtgatgaagagcaagaacgaccagggcatcaccaacaagtgcaagatgaacctgcaggacaacaacggcaacgacatcggcttcatcggcttccaccagttcaacaacatcgccaagctggtggccagcaactggtacaacaggcagatcgagaggagcagcaggaccctgggctgcagctgggagttcatccccgtggacgacggctggggcgagaggcccctgtga

SEQ ID NO: 87 - DNA, 3891 bp, Artificial Sequence
  BoNT/A,  S. scrofa-modified 3
atgcccttcgtgaacaagcagttcaactacaaggaccccgttaatggagtcgacatcgcttacatcaaaattccaaacgctgggcagatgcagccggttaaggcttttaagatccacaataagatttgggtgatccccgaaagagatacattcacaaatccagaggaaggtgacctgaaccctcccccagaagccaaacaggtgccagtgtcctactatgatagcacctacctgtccactgacaacgagaaagacaactatctgaaaggggtgaccaaactttttgaacgaatctattctacagacttgggaaggatgctgcttacctcaatcgtgagaggcattcctttttgggggggatccaccatcgacaccgagctcaaggtgatcgacaccaactgcattaacgttatccagccagacgggagctaccgatcagaggaacttaatcttgtgattatcggtccgtctgccgacattatccagtttgagtgcaagtcattcggccatgaggttctcaacctgacgaggaacggctatgggtcaacacagtacattagattcagcccagacttcacgttcggcttcgaagagagtctggaggtggacaccaatcccctcttgggcgccggaaaattcgcaaccgatccggccgttactctggcacatgagctcatccacgccggacaccgactttacggtatcgccatcaaccctaaccgggtttttaaggtgaatacaaacgcctattacgagatgtcagggctcgaggtgtcattcgaggaactgcgcacttttggcggtcacgacgccaagttcatcgatagccttcaggagaatgaattccgcctgtactattacaataagtttaaagatattgcctccactttgaataaagccaaaagcattgtcggaacaacggccagtctgcagtacatgaaaaatgtctttaaagagaagtatcttttgtccgaggacacgagcggtaagttcagcgtggataagctgaagttcgataagctctacaaaatgctgacagagatctacaccgaagacaatttcgtcaaattctttaaagtgctgaataggaagacttacctcaatttcgataaggccgtgtttaaaatcaatatcgtgcccaaggtcaactacaccatctacgatgggttcaacctcaggaacaccaacctggcagccaacttcaatgggcagaacacggaaatcaataacatgaactttacaaagcttaaaaattttacaggcctctttgaattctataaactgctctgcgtgagaggaattatcactagtaaaactaaatcccttgacaagggatacaataaggccctgaacgatctctgcatcaaggtgaacaattgggacctgttcttttctccgtctgaagacaattttaccaacgatctgaacaaaggcgaagagattacgtcagacacgaatattgaggccgcagaggaaaacatttccttggatctgatccagcagtactatctgacttttaactttgacaacgaacctgaaaatatctccatcgaaaacctgagctccgacattatcggccagcttgagctgatgcctaatattgagaggtttcctaacggcaaaaagtatgaactggataaatataccatgtttcattacctgagggctcaggaattcgaacacggaaagtctaggatcgctctgactaatagcgtgaatgaagctctgctcaacccctctcgcgtgtatacattctttagctccgactacgtcaaaaaggtgaacaaggctaccgaggcagccatgttcttgggctgggtggagcagctggtctacgatttcaccgatgagacctccgaggtcagcaccactgataagatcgcagacatcaccatcattatcccttatatcggcccagcccttaacatcggcaacatgctgtataaagacgatttcgtgggggctctgatcttctccggcgccgtgatcttgctggagtttattcccgagatcgccatccccgtgctggggaccttcgctctcgtcagttacatcgccaacaaggtgctgaccgtccagaccattgacaacgccctgagtaagagaaatgaaaagtgggacgaggtctacaagtacatcgttacaaattggctcgctaaggtcaacacacagatcgacctcattaggaagaaaatgaaagaggccctggagaatcaggcagaggccaccaaggccattatcaactaccagtacaatcagtacactgaggaagagaaaaacaatattaacttcaacatcgacgatctgtcaagcaaactgaacgaatccatcaataaggctatgattaatatcaataagttcctgaaccagtgttctgtgtcttatctgatgaacagcatgatcccatacggcgtgaagcgcttggaagacttcgatgcaagtctgaaagatgctttgctgaagtacatttacgataaccgcggcaccctcatcggacaggtcgaccggctgaaggacaaggtgaataacaccctgagtactgatattccctttcagctctctaagtatgtcgacaatcagaggctgctctccactttcacagagtatatcaaaaacattatcaacacgagtattctgaatctgcggtacgagagtaaccacctgatcgacctcagcagatacgccagcaagatcaatattggcagcaaggtgaattttgaccctatcgacaaaaaccagatccagctgttcaacctcgaaagctcaaagatcgaggtgatcctgaagaacgccattgtgtacaatagcatgtacgagaacttcagcacttctttctggatccggatcccaaagtacttcaatagcatcagcctgaacaatgagtataccatcattaactgtatggagaacaattccggctggaaggtgtccctcaattacggggagatcatttggacacttcaggatacacaggagatcaagcagcgggtcgtgttcaaatactcacagatgatcaacatctctgattatatcaaccgctggatcttcgtgaccattaccaacaatcggttgaacaattctaagatttatatcaatggacggctgatcgaccagaagcctattagtaatctcggaaacattcacgcaagcaacaatatcatgttcaaactggacggatgcagagatactcatcgctacatctggatcaagtactttaatctgtttgacaaggagttgaatgaaaaggagattaaggatctgtacgacaaccagagcaactccggaatcctgaaggatttctggggcgactatttgcagtacgataagccctactatatgcttaacctgtatgaccccaacaagtacgttgacgtgaacaatgtgggcatccgaggatatatgtatctcaagggcccccgagggagcgtgatgaccacaaacatctacctgaactctagcctgtacagaggtacgaagtttatcattaagaaatatgccagcgggaacaaggacaatatcgttaggaacaatgacagggtttacatcaatgtcgtggtcaaaaacaaagagtataggctggccaccaacgcaagtcaggccggtgtggagaagatcctctccgccctggagatccctgacgtcggtaacctctcccaggtggtcgtgatgaaaagcaaaaacgaccaggggatcacgaacaagtgcaaaatgaacctgcaggataacaacgggaacgatatcggtttcatcggctttcaccagttcaacaacatcgccaagctggtggcttccaactggtacaaccggcagatcgagcgctcttcccgcaccttgggctgtagctgggagttcatccccgtcgatgacgggtggggcgaacggccgctgtga

SEQ ID NO: 88 - DNA, 3891 bp, Artificial Sequence
  BoNT/A,  B. taurus-modified 1
atgccttttgtgaacaaacagttcaactacaaggatccggttaacggtgtcgacatcgcttacatcaaaatccctaacgcaggacaaatgcagccagtaaaagcttttaaaattcacaacaagatttgggtgatcccggagcgggatacctttacaaaccccgaagagggagatctaaacccacccccggaggccaaacaggtgcccgtctcctactatgactcaacctatttgagtacggacaacgaaaaagacaattacctgaagggagttacaaaattgttcgagagaatctatagcacagatctcggaaggatgctcctgacttccatcgtaagaggaatacccttctggggtggctcaactatcgatacagagctgaaagttattgatactaactgcatcaacgtcatccaacccgacggcagctatcgatcagaagagctgaacctggtcattatcggcccttccgccgacattatccagttcgagtgtaaaagtttcggccacgaagttctgaacctaacccgcaacggatacgggagtacccagtatatccgcttctcaccagacttcacattcggcttcgaggaaagcttagaagtggatactaacccccttttaggtgcggggaagttcgccactgacccagcggttaccttggctcacgagctgatccacgcaggccatcgtctatatgggattgccattaatcccaaccgggtctttaaggtaaataccaacgcctattacgagatgagtggactggaggtgtctttcgaggaacttcggacctttggagggcatgacgcgaagtttatcgactctctgcaggagaacgaatttcgcttgtactattacaataagttcaaggacatagctagcacactgaataaagcgaagagcatagtaggcactacagcctccctgcagtacatgaagaacgttttcaaggaaaaatatctcctgtccgaggacacctccggtaagtttagcgttgataagctgaaattcgataagttgtacaagatgctcaccgagatttataccgaggacaacttcgtgaagtttttcaaggtgctgaatcgaaagacatacctgaatttcgataaggcagtcttcaaaattaacatcgtgcccaaggtgaattatacaatctacgacggcttcaaccttagaaacactaacttggcggcaaacttcaatggccagaacacggaaatcaacaatatgaacttcactaaactaaagaatttcaccggactctttgagttttacaagctgttgtgcgtgcgcggcatcataactagcaagaccaagagcctggacaaaggttataacaaggccctgaacgacctctgcatcaaagtcaacaattgggatctgtttttcagcccatccgaggacaatttcacgaacgacttaaataagggggaggaaataacatctgacaccaatatagaggcagctgaagagaatatcagcctcgatctgatccagcaatactatctgacatttaatttcgacaacgagccagaaaatattagcatcgagaatcttagctctgacattataggccagctggagcttatgccaaacatcgaacggttccccaatgggaagaaatacgaactcgataaatatacgatgttccattacctgagagcccaggaatttgaacacggaaagtcgagaattgctctgactaactcagtcaacgaggccctgttgaaccctagccgcgtgtacacgttctttagtagcgattacgtgaagaaagtgaacaaagccaccgaggccgcaatgttcctgggctgggtggagcaactcgtctacgacttcaccgatgagacctccgaggtttcaacaaccgacaaaattgccgacatcaccatcattatcccttatatcggccccgctttaaacatcggaaatatgctctataaagacgattttgtgggcgcactcatcttcagcggcgccgtgatcctgttggaattcatcccggagatagcgattcccgtcttggggaccttcgctcttgtgagttacatcgccaacaaagtgctgacagttcaaaccattgataacgctctgtccaagcgaaacgagaagtgggacgaggtgtataaatacatcgtgacaaactggctggccaaagtgaatacgcaaatcgacctcatccgtaaaaagatgaaggaggcactagaaaaccaagctgaagccactaaggccatcattaactatcaatacaaccagtacaccgaggaagagaagaacaatataaactttaacatcgatgacctttccagcaagctgaacgagagtatcaataaggctatgatcaacattaataaatttttaaatcagtgctctgtgtcttacctgatgaattctatgatcccatacggagtgaagaggttggaggacttcgacgcatctctgaaggacgccctccttaagtatatctacgacaaccgcgggactctcattggccaggtggatagattgaaggataaagtcaacaatacactctccactgacattcctttccagctgtccaaatacgtggataatcagcggctcctgagcaccttcaccgagtacatcaaaaacattatcaacacgagtatattaaatctgaggtacgagagcaatcatctgatcgatctatcaaggtacgccagcaagatcaatataggctctaaggtaaattttgacccaatcgacaaaaaccagatccagctgttcaatctcgaatcctcaaagattgaagtgattctcaagaacgcaatcgtctacaacagcatgtacgaaaacttcagtacctccttctggattaggattcctaaatacttcaattccatctccctgaacaatgagtacacaattatcaactgtatggagaacaattccgggtggaaggttagtcttaactacggcgaaatcatttggaccctccaggacacgcaagagatcaagcagcgggtcgtgttcaagtattctcagatgatcaacatctctgattacattaataggtggatctttgtgaccatcactaacaatagactgaacaatagtaagatatacattaacggtcgacttatcgaccagaaaccgatcagtaaccttggcaacatacacgcctctaataacattatgtttaaactggacgggtgtcgggatacccacaggtatatctggatcaagtattttaacttgtttgataaggaactcaacgagaaagagattaaggacctttacgataaccagtctaactccggtattctcaaggacttttggggtgactatctgcagtacgataagccctactatatgctgaatctgtacgatccaaataagtacgtggacgtgaacaatgtgggcatccgcggatatatgtatctcaagggccctcgtggttctgttatgaccactaatatctatctgaactccagcctgtacagggggaccaagtttatcattaaaaagtacgccagcgggaataaagacaacatcgtcaggaacaatgatagagtgtacattaatgtggtcgtgaagaataaggagtaccgactggctacaaatgcatcgcaggccggggtcgaaaagattctctccgccctcgaaatacctgacgtcggtaacctctcacaggtagtggtcatgaagtcgaaaaacgatcagggaattacaaacaagtgcaagatgaacctgcaggacaacaatggcaacgatatagggtttataggatttcaccagtttaacaatatagctaagctggtagcttcgaactggtataaccggcagattgagcgttcatcgcgcacgcttgggtgttcatgggaattcatccctgtggatgacggctggggtgagcggcccctgtga

SEQ ID NO: 89 - DNA, 3891 bp, Artificial Sequence; identical to SEQ ID NO: 86
  BoNT/A,  B. taurus-modified 2

SEQ ID NO: 90 - DNA, 3891 bp, Artificial Sequence
  BoNT/A,  B. taurus-modified 3
atgccctttgtgaacaagcagttcaactacaaggaccccgtgaacggcgttgatattgcatatatcaagatcccaaacgctggccagatgcagcctgtgaaggccttcaaaattcacaataagatctgggtgattcccgagagagataccttcactaacccagaggaaggcgatctcaatccacctcccgaggccaagcaggtccccgtcagctactatgacagcacctatctgagcaccgataacgaaaaagacaactacctgaagggcgtgacaaaactttttgaacggatttactccacagacctgggacgcatgctgcttacgtccatcgttcggggtatccccttttggggcgggagtacaatcgacaccgagctgaaggtgatcgatactaactgcatcaatgtgatccagcccgatggcagctaccgaagcgaggaactgaacctggtgatcattgggccatccgctgatattatccagttcgagtgtaagagctttggacacgaagtgttgaaccttacgagaaacggctacggtagcacccagtacattcgcttctctcccgacttcacctttggtttcgaggaatccctggaggtggatacgaacccacttctgggcgccgggaagttcgcaactgaccccgccgtcactctggcccacgagcttattcacgccgggcataggctctatgggattgccatcaacccaaaccgagttttcaaagtgaatacaaacgcctattacgaaatgtccggcctggaggtctctttcgaggaactgagaacctttggcgggcatgacgcaaagttcatcgactcactccaggagaatgagtttcgtctgtattactataacaaatttaaagacatcgcaagcacgctcaacaaggcaaaatccatcgtgggtactaccgcctccctgcagtatatgaagaacgtctttaaagagaaatatttgctctctgaggacacctccggtaaattcagcgtcgataaacttaagttcgataagctgtataagatgctgactgagatttacaccgaggataatttcgtcaaatttttcaaggtgctgaacaggaagacctacttgaacttcgacaaagccgtcttcaagatcaacattgtgcctaaagttaactacacaatctacgacgggttcaaccttcgcaacacaaacctcgctgccaacttcaatggacagaataccgagatcaataacatgaatttcaccaagttgaaaaattttaccgggcttttcgaattttacaagctgctctgtgttcgagggatcattacatctaagaccaagagcctggacaaaggatacaataaagccctgaacgacctttgtattaaagtcaataactgggatctcttcttttcaccctcagaggacaacttcaccaacgatctgaataaaggagaggaaatcacttcagacacaaacatcgaggctgcagaggaaaacattagcttggatttgatccagcagtattacctgacttttaacttcgataacgagcctgagaatatctcaatcgaaaacctgtcttcagacatcattggccagctggagttgatgcccaacatcgagcggttccctaatggaaaaaagtatgaactggacaagtacacaatgtttcattatctccgggcccaggaatttgagcatggtaagtccagaattgctctgactaactccgtcaatgaggcactgctcaaccctagcagagtctacacgttctttagctccgattacgtgaagaaagtgaacaaggctaccgaggccgctatgtttctgggttgggtcgaacagctggtgtacgatttcaccgacgagacttctgaggtgtcaacaactgataagatcgccgatatcactattatcattccctacatcggaccagctttgaatatcgggaacatgctgtacaaagacgatttcgtgggtgctctgatcttttctggggccgtcatccttctggaattcatcccagagatcgctatccctgtgctgggcaccttcgccctggtctcctatatcgccaataaagttctgaccgttcagacaattgacaatgctctgagcaaaaggaacgaaaagtgggacgaagtctacaagtatatcgtgactaattggctggcaaaagtgaatactcagattgaccttattcgcaagaaaatgaaggaggccctggagaatcaggctgaggcaaccaaggcaattatcaactaccagtataatcagtataccgaggaagagaaaaacaatatcaattttaatattgacgatctgtccagtaagctcaacgagagtattaacaaagccatgatcaacatcaataaattcctcaaccagtgctctgtgtcttacctgatgaacagcatgatcccttatggggtgaaacggctcgaggattttgacgcctccttgaaggacgccctccttaaatatatctacgacaaccgcggtaccctgatcggacaggttgacagactgaaagacaaggtgaacaatacgctcagtaccgacatcccctttcagctcagcaagtacgtggataaccagaggttgctctcaaccttcacagagtacattaagaacatcattaacacatctattctgaatttgaggtacgaatccaatcacctgatcgacctgtcaaggtacgctagcaagatcaacatcggaagcaaggtgaacttcgaccccatcgacaagaaccagatccagctgttcaatctggaaagttccaaaatcgaggtgatcttgaagaacgccattgtgtataactctatgtacgaaaatttcagtaccagcttctggattaggatccccaagtatttcaacagcatctctctcaacaatgagtacacaatcattaactgtatggaaaacaatagtgggtggaaggttagtctgaactacggtgaaatcatttggacgctgcaggacacgcaggagatcaagcagagagtggttttcaagtactctcagatgatcaacatttccgattatattaataggtggatctttgtgacaatcacaaataaccggctgaacaatagcaagatttatatcaatggccgactgattgatcagaagcccatcagcaatctcggaaatatccacgccagcaacaatatcatgtttaaactggacggttgccgcgatacccaccgctacatctggatcaagtactttaacctgtttgataaggagttgaatgaaaaggagattaaggacctctacgacaatcagagtaattcagggatccttaaagacttctggggcgactacctgcagtacgacaagccatactatatgctgaacctctacgaccctaataagtacgtggatgtgaacaatgtgggcattcggggctacatgtacctgaagggcccccggggaagtgtcatgaccacaaacatctacctgaactccagcctctatagaggaacgaagttcatcatcaagaaatatgcctccgggaacaaggataatatcgtgaggaataacgaccgtgtgtatatcaacgtggtcgtgaagaacaaagagtaccgtctcgctacaaacgcctcccaggcaggcgtggaaaagatcctgagtgccctggagatcccagacgtgggaaatctgtctcaggtggttgtgatgaagagcaagaacgaccagggcatcactaacaaatgcaagatgaacctccaggacaacaatggaaacgatatcggcttcatcggatttcaccagttcaataacatcgccaagctggtcgccagcaactggtataaccgacagatcgaacgtagcagtcgcaccctcggctgctcatgggaatttatccccgtggatgatggctggggcgaacggcctctgtga

SEQ ID NO: 91 - DNA, 3891 bp, Artificial Sequence
  BoNT/A,  E. caballus-modified 1
atgccgtttgtcaataaacagtttaactacaaagatcccgtcaacggagtggacatcgcctacatcaaaattccgaatgccgggcagatgcagcccgtgaaggctttcaagattcacaacaagatctgggttatccctgagcgcgacaccttcaccaaccctgaggaaggagacctgaaccctccccctgaggctaagcaagttcccgtgtcgtactatgactctacgtacttatctacagacaatgaaaaggacaattacctaaagggtgtgaccaaattgttcgagcggatctactccaccgatctcggtagaatgctgttaacctctatcgtccgcggtatccccttctggggcggtagcacgatcgatacagagttgaaagtgatagatacgaactgtatcaacgttatacaaccagacggctcgtacaggtctgaggaactaaatctcgtgattatcgggccatcagccgacatcattcagttcgagtgcaagtcattcgggcacgaggtgttgaatttgacaaggaacggctacgggtcaactcagtacattcgcttcagcccggattttacatttggatttgaagagtccctcgaggtggacaccaaccctctgttgggagcaggaaagttcgctaccgaccctgctgtgaccctcgcacatgaacttatacacgccggccacagactgtacggcattgctataaaccccaacagggtgtttaaggttaatacgaacgcgtactatgaaatgagtggactggaggtttcctttgaggaactgaggacgttcggagggcatgatgccaaatttatcgattctcttcaggagaacgagtttcgcttgtattactataacaagtttaaggatatcgccagcacactgaacaaagccaaatctatcgtggggacaactgctagcctgcagtatatgaagaacgtctttaaggagaagtatctgcttagcgaggacactagtgggaaattctctgtcgacaaactgaagtttgataaactttacaaaatgctgaccgagatctacaccgaggataatttcgtgaaattctttaaggtactgaatcggaaaacctacctcaacttcgataaggcggtcttcaagataaacattgtccctaaggtgaattatactatctacgacggatttaacttgcgtaatactaatcttgctgccaatttcaacggccagaacactgaaatcaacaatatgaattttactaaactgaaaaactttaccggcctctttgaattttacaaacttctgtgcgtccggggcatcattacttcaaagaccaaaagtctggacaaggggtacaataaggccctgaatgacctgtgtatcaaggtgaacaattgggatttatttttctccccatctgaggacaatttcactaatgacctgaacaaaggtgaagagataacatccgatacaaacatcgaggctgccgaagagaatatcagcctcgatctcatccagcaatattacctcacgttcaacttcgacaacgaacctgagaacatttccatagagaatcttagttcagacatcattggccagctggagttgatgcctaacattgaacggtttcccaacgggaagaaatatgaattggacaaatacacaatgtttcactatctgagagcccaggagttcgagcatggcaaatccagaatcgccctgacgaatagcgttaacgaggctctgttaaacccatccagagtctacactttcttttccagcgactacgtcaagaaagtaaacaaggccaccgaagcagcgatgttcctggggtgggtggaacaacttgtgtatgatttcaccgacgagacatccgaagtcagcaccacagataagattgctgacatcaccatcattatcccctacattggccccgctctgaacatcggaaatatgctgtacaaggacgatttcgttggggccttaatttttagcggagccgtaatcctcctggagtttataccagagatcgccattcccgtcctgggaactttcgcactggtgagttacatcgccaacaaagtactcacagtgcaaaccattgacaatgccctaagcaagcgaaatgaaaaatgggatgaggtgtacaagtatatcgtgacaaattggctggcgaaggtgaacactcaaatcgacctgattcgtaaaaagatgaaggaggcactggagaatcaggccgaagcaacaaaagcgattataaattaccagtacaatcagtacacggaagaggaaaagaacaatatcaacttcaacatcgacgatctgtcgagcaagcttaacgagtctattaacaaggccatgatcaatattaacaagtttctgaatcagtgcagtgtgagctacttgatgaactctatgattccttatggcgtaaagagactcgaggacttcgacgccagtctgaaggacgcactgctcaagtacatctacgataaccgcgggactctgatcggtcaggtggatcgcctaaaggacaaagtgaataacaccctgagcaccgacatacccttccaactttctaagtacgtagataaccagcgtctcctgtcaactttcaccgagtatataaagaacattataaatacttctattttgaacttgcggtatgaaagcaaccacctcattgatctgtcaagatatgcatccaagatcaatattgggtctaaagttaatttcgaccctattgataagaaccaaattcagctcttcaacctggaatcatccaaaatcgaggttatcctgaaaaatgccatcgtctacaactcaatgtacgagaacttcagcacatcattctggatccggatacctaagtatttcaattccatctccctgaacaatgagtacacgatcattaactgtatggagaacaatagcggctggaaagtcagtctgaattacggtgaaataatctggaccctccaggacacccaggaaatcaaacagagggtggtcttcaagtattcacagatgatcaacatcagtgactatattaacaggtggatctttgtgaccatcaccaacaatcgactcaacaattccaaaatctacatcaacggcaggctgatcgatcaaaagccaatctcgaacctggggaacattcatgcttccaataacatcatgtttaagctcgatggctgtcgagacactcacagatatatctggattaagtatttcaacctctttgacaaggagctcaacgagaaagagatcaaagacctatatgataatcagtctaacagtggcatcttaaaggacttctggggagactacctacaatacgacaaaccctattacatgcttaacttgtatgacccaaataagtacgtcgatgtgaacaatgtgggcatccgcggatacatgtatctgaagggtccccgaggaagcgtgatgacaaccaacatttatctgaattcttccttgtaccgcggcaccaaattcattatcaagaaatatgcctccggtaataaggacaacatagtgcggaacaatgaccgtgtttacatcaatgtcgtggttaagaataaggaatatagactcgcaaccaatgctagtcaggcgggcgtggaaaagatactctcagctcttgaaatcccagacgtggggaatctttcccaggtcgtggtcatgaagtccaagaacgatcagggaatcactaataagtgcaagatgaacctgcaggataacaatggcaacgatatcggcttcattggcttccatcagtttaacaatatcgccaaacttgtggcaagtaactggtacaacaggcagatagagaggagcagccggacactcggttgcagctgggaattcattccagtggatgacggctggggagagaggccgctgtga

SEQ ID NO: 92 - DNA, 3891 bp, Artificial Sequence; identical to SEQ ID NO: 86
  BoNT/A,  E. caballus-modified 2

SEQ ID NO: 93 - DNA, 3891 bp, Artificial Sequence
  BoNT/A,  E. caballus-modified 3
atgccattcgtcaataagcaatttaactacaaggaccccgttaacggagtggatatcgcctacatcaaaatccccaatgctggccagatgcagcctgttaaagccttcaagattcataacaagatctgggttattcctgagcgagacaccttcaccaatcctgaagagggagacctcaacccacctccagaagcaaagcaggtgccagttagctactatgacagcacctacctgtctaccgataacgagaaagacaattacctgaaaggcgtgactaagcttttcgaacggatttactctactgacctcgggaggatgctgttgacttccatcgtgcgtggcatccccttctggggcggatccaccatcgatacagaactgaaagtgatcgatacaaattgtattaacgtgatccagcctgacggaagctacaggagtgaggaactgaatctggtgatcattgggcccagcgccgacattatccaattcgagtgtaagtccttcggtcacgaagtgctgaacctgacccgcaacggctatggttctacccagtatatccgcttctcaccagacttcaccttcggcttcgaagagtctctcgaggtggacaccaaccccctcctgggtgctgggaagttcgcaactgacccagccgtcaccctcgctcatgagctgattcacgctggccaccgcctgtatggtatcgccattaaccctaacagagtcttcaaagtgaacactaacgcctactatgaaatgtccggactggaagtcagttttgaggaacttaggacattcggcggacatgacgccaagttcattgatagccttcaggagaatgagttccgcctgtactattacaataagttcaaggacatcgccagtactctgaataaagctaaaagtatcgtgggcaccacagcctccctgcagtatatgaagaacgttttcaaggagaagtacctgttgagtgaagatacctctggaaagttttccgtggataaactgaaattcgacaaattgtacaagatgctgacagagatctacaccgaagataactttgtgaagtttttcaaagtgctgaatagaaagacatatctgaacttcgacaaagctgtctttaaaatcaacatcgtccccaaagtgaattataccatctacgacggttttaatctgaggaatacaaacctcgcagccaactttaacggacagaataccgagatcaacaatatgaattttacaaaacttaagaactttaccgggttgtttgaattttacaagttgctgtgcgtcagggggatcattacaagcaagactaagagcttggataagggctataataaggccctcaatgatctctgcatcaaggtgaacaattgggatctgttctttagccccagcgaggataattttacaaacgacctcaataagggagaagagattacatcagataccaatattgaagccgctgaagagaacatctccctggatctgattcaacagtattacctgactttcaatttcgacaatgaacccgaaaacatctccatcgagaatctgtcttccgatattatcggccagctcgagctgatgcctaacatcgagcgctttcccaatggaaagaaatacgagctcgacaagtacaccatgtttcactatctcagggctcaggagttcgaacacggtaagagcagaatcgccttgaccaattctgtgaacgaggccttgctgaacccctctcgagtgtatactttcttttccagcgactacgtcaagaaagtgaacaaggcaaccgaggctgccatgttcctcgggtgggtggagcagctcgtgtacgacttcaccgatgagacctctgaggtgtcaacaactgacaagatcgcagacatcaccattatcattccctacatcggacctgctctgaacattggcaacatgctgtataaagacgattttgttggagccctgattttcagcggcgcagtcattctgttggagttcatccccgagatcgccatccccgtcctgggtacattcgccctggtctcatacatcgccaacaaagttctcactgtgcaaaccattgacaatgctctctcaaagcgtaacgagaaatgggacgaggtttacaagtatattgtcaccaactggctggccaaagtgaacactcagatcgacctcattcggaaaaagatgaaagaggcccttgagaaccaggccgaggccaccaaagccatcattaactaccagtataaccagtacactgaagaggaaaagaataacattaacttcaacatcgatgacctttcttcaaaactcaacgaatcaatcaacaaagccatgatcaatattaacaaattccttaaccagtgtagcgtcagctacctgatgaactccatgatcccctacggggtgaagagactggaagattttgacgcttccctgaaggatgcactcctgaagtatatctacgataatcgcggcactctgatcgggcaggtcgaccggctgaaggacaaagtgaacaataccttgtctaccgatatcccattccagcttagcaagtacgttgacaatcagcgcttgctcagcacatttaccgagtatattaagaatattatcaatacaagtatcctgaatctgcgctacgagagcaatcatttgattgatctgtcccggtacgcatccaagatcaacatcggtagcaaggtcaactttgatcctattgacaagaatcagatccaactgttcaacctggaaagttcaaaaattgaagtcatccttaagaacgccatcgtgtacaactcaatgtatgagaacttcagcacctcattttggatcaggattcccaaatattttaatagtatcagccttaacaatgagtatactatcattaactgcatggagaataactccgggtggaaggtgtccctcaattatggagagatcatttggactctccaagacacacaagaaatcaaacagagagttgtgttcaagtacagccagatgatcaacatctccgattacatcaaccggtggatttttgtcaccatcacaaataaccgtctgaacaattccaagatctacatcaacggccgacttatcgatcagaagcctatctcaaatctggggaacatccacgcttccaataacatcatgttcaagttggacggctgccgagacacccaccggtacatttggatcaagtatttcaacctgtttgacaaggagctgaacgaaaaggagatcaaagatctgtatgataatcagtcaaatagcggaatccttaaggacttctggggcgactacctgcagtacgacaagccatattacatgttgaacctgtacgatcctaataagtacgtcgacgtgaacaatgtgggcatcagaggttatatgtacctgaaggggcccagagggtctgtgatgaccactaacatttatcttaatagtagcctgtatcggggcaccaaatttatcatcaaaaagtacgctagcggaaacaaagataacatcgtgaggaacaatgacagagtgtacatcaatgtggtcgtgaagaacaaagagtaccgtctggcaaccaatgcctcccaagccggagttgagaaaatcctgtctgccctggaaatccctgacgtgggcaacctgagtcaggtggtggtgatgaagtctaagaacgatcagggcatcaccaacaaatgcaaaatgaaccttcaagacaataacgggaacgatatcgggtttatcggctttcatcagttcaataacatcgcaaagctcgtggccagcaattggtacaataggcaaatcgagcggtctagtagaaccctcggctgtagttgggagtttatcccagtggacgacggttggggggaaaggcccctgtga

SEQ ID NO: 94 - DNA, 3891 bp, Artificial Sequence
  BoNT/A,  C. aethiops-modified 1
atgccttttgttaataagcaattcaattacaaagatcctgtaaatggtgtggacatcgcctacatcaagattccaaacgccggacagatgcagccagttaaggcattcaagattcataacaaaatctgggtcatcccagaacgagacacattcaccaaccctgaggaaggggatcttaacccgcccccagaagcaaagcaagtgccagtctcctactatgactctacgtacctatccacagataatgagaaagacaactacctaaagggcgtcacgaaacttttcgaaagaatatattccacagatctgggccgcatgcttttgacttctattgttcggggcatcccattctggggtggcagcactatagatacagagctgaaggttattgacaccaactgcatcaacgtcattcagcctgatgggtcctaccggtctgaagagctgaacctggtcatcattggcccctccgccgatataatccagtttgagtgcaagtctttcggacatgaggtgcttaatctgactcgcaacgggtacggatctacacagtatatccgcttttcaccggatttcacgtttggtttcgaggaatctttggaggtcgataccaatcctctacttggcgctgggaagtttgcaaccgacccagccgtgacactggcacacgagctgattcacgctggacatcgactatacggtatcgcaatcaatcccaatcgagtgttcaaggtaaatacaaacgcttactatgaaatgagcggattggaagtgagctttgaggaactccgaacgttcgggggccacgatgctaaattcatagatagcctgcaggagaatgagttccgtctgtattactataataaattcaaagatatcgccagtactctcaacaaggcaaagtcgatcgtggggactacagctagtctgcaatacatgaagaacgtttttaaggagaagtacttgctgtcagaagacacctcagggaagttttcggtggacaagcttaagtttgataaattgtacaagatgctcacagaaatatatacagaggacaactttgtcaagttctttaaggtgcttaacagaaagacctatttgaacttcgataaagccgttttcaaaatcaatattgtccctaaggtgaactatacaatctacgacggattcaatcttaggaatacgaacctggctgcgaacttcaacggccagaacacagagatcaacaatatgaatttcacaaagctcaaaaattttacgggtctattcgaattttataaactgctctgcgtcaggggcatcattactagtaaaaccaaatccctcgataaagggtacaataaagccctaaatgatctctgtataaaggttaacaattgggaccttttcttttcaccctcggaggacaacttcaccaatgatctgaataaaggggaagagatcacctccgataccaacattgaagctgcggaagagaatatcagcctcgacctaattcaacagtactatctgaccttcaactttgacaatgaacccgagaatatctccatagagaacctgagctcagacataatcggacagctcgagttgatgcctaatatcgaaaggttccccaacgggaagaaatatgagttagacaagtacacgatgtttcattatctgagggctcaagagtttgagcacggcaagtcccggatcgcactaaccaacagtgtgaacgaggccctcctgaatccaagcagagtatataccttcttttcttccgactacgtgaaaaaggttaacaaagcgactgaggctgcaatgttcttaggttgggtggagcagctggtatacgacttcactgacgagacgagcgaagtctctactacagataagattgcagatatcacaatcattataccttatataggccccgccctgaacattggaaacatgttatataaggatgactttgttggggcactgatctttagcggtgccgtcattcttctggagtttatccccgagatcgccattcccgtcctcggaactttcgccctcgtgagctacatcgcaaataaggttctgacggtccaaacaatcgacaacgctttatcaaaacgaaatgaaaaatgggacgaggtgtacaaatacattgtgactaattggctggctaaggtaaatacccagatcgacctcatcaggaagaaaatgaaggaggctctggaaaatcaagccgaagctaccaaagccatcattaattaccagtataatcagtatacggaagaggaaaaaaataacataaacttcaacattgacgatctcagctccaaattgaacgagagcatcaacaaggcgatgatcaatatcaataaatttcttaatcaatgctccgttagctatttgatgaacagcatgatcccatacggcgtaaaacgcttggaggatttcgatgcttctcttaaggacgccctgttgaaatacatttatgataacaggggcacactgataggccaggtcgatagattaaaggataaagtgaacaataccctctctacggacattcccttccagcttagtaagtacgtggacaatcaacggttgctgagtacatttacagagtatattaagaacatcataaataccagcattttgaacctccggtacgaatccaaccacctgattgacctgagtcgttatgccagtaagattaacatcggctcgaaagttaattttgatcccatcgacaaaaaccagattcagctgtttaacttggaaagctccaaaatcgaagtaatcctgaagaatgccatcgtgtataactctatgtatgaaaattttagtacctcattttggatcaggatccccaagtacttcaactctatttcactgaacaatgaatatactatcattaactgtatggagaataactctgggtggaaagtctcactgaactacggcgaaattatatggactctgcaggacacccaggagattaagcagcgcgtggtcttcaaatattctcagatgattaatataagcgactacattaaccgctggatttttgtgacaataacaaataaccgccttaataacagtaagatctatattaacgggagactcatcgatcagaagccgattagtaacctgggaaacatacacgcctccaataacatcatgttcaaactggacggttgtcgcgacacccatcgttacatctggatcaaatatttcaatttatttgataaagaattaaacgagaaagaaattaaggacctttacgataaccagtctaactctggcattctgaaggacttttggggagactatcttcaatatgataaaccgtattacatgctcaacctctacgatcctaataagtacgtcgacgtcaataacgtgggcattagaggatatatgtatctgaagggaccaagaggctcagtgatgactacgaatatctacctgaacagctctctctaccggggcactaagtttatcataaagaaatacgcgtccggtaataaggacaacattgtgagaaacaatgacagagtgtatatcaacgtggttgtgaagaataaagagtacaggctggccactaacgcctcacaggctggagtggagaaaattcttagcgcactggagatcccagatgtgggaaacctgtcacaggtggtcgttatgaagagcaagaatgatcaggggatcaccaacaaatgtaaaatgaatctccaggataacaatggaaacgacatcgggttcatcgggttccaccaattcaataacatcgctaagctggtggcctcaaattggtacaatcgtcaaattgagcggtccagtagaaccctcggttgctcctgggagttcatcccagttgacgatggctggggcgagcggcctctgtga

SEQ ID NO: 95 - DNA, 3891 bp, Artificial Sequence
  BoNT/A,  C. aethiops-modified 2
atgccattcgtgaacaagcagttcaactacaaggacccagtgaacggcgtggacatcgcctacatcaagatcccaaacgccggccagatgcagccagtgaaggccttcaagatccacaacaagatctgggtgatcccagagagagacaccttcaccaacccagaggagggcgacctgaacccaccaccagaggccaagcaggtgccagtgagctactacgacagcacctacctgagcaccgacaacgagaaggacaactacctgaagggcgtgaccaagctgttcgagagaatctacagcaccgacctgggcagaatgctgctgaccagcatcgtgagaggcatcccattctggggcggcagcaccatcgacaccgagctgaaggtgatcgacaccaactgcatcaacgtgatccagccagacggcagctacagaagcgaggagctgaacctggtgatcatcggcccaagcgccgacatcatccagttcgagtgcaagagcttcggccacgaggtgctgaacctgaccagaaacggctacggcagcacccagtacatcagattcagcccagacttcaccttcggcttcgaggagagcctggaggtggacaccaacccactgctgggcgccggcaagttcgccaccgacccagccgtgaccctggcccacgagctgatccacgccggccacagactgtacggcatcgccatcaacccaaacagagtgttcaaggtgaacaccaacgcctactacgagatgagcggcctggaggtgagcttcgaggagctgagaaccttcggcggccacgacgccaagttcatcgacagcctgcaggagaacgagttcagactgtactactacaacaagttcaaggacatcgccagcaccctgaacaaggccaagagcatcgtgggcaccaccgccagcctgcagtacatgaagaacgtgttcaaggagaagtacctgctgagcgaggacaccagcggcaagttcagcgtggacaagctgaagttcgacaagctgtacaagatgctgaccgagatctacaccgaggacaacttcgtgaagttcttcaaggtgctgaacagaaagacctacctgaacttcgacaaggccgtgttcaagatcaacatcgtgccaaaggtgaactacaccatctacgacggcttcaacctgagaaacaccaacctggccgccaacttcaacggccagaacaccgagatcaacaacatgaacttcaccaagctgaagaacttcaccggcctgttcgagttctacaagctgctgtgcgtgagaggcatcatcaccagcaagaccaagagcctggacaagggctacaacaaggccctgaacgacctgtgcatcaaggtgaacaactgggacctgttcttcagcccaagcgaggacaacttcaccaacgacctgaacaagggcgaggagatcaccagcgacaccaacatcgaggccgccgaggagaacatcagcctggacctgatccagcagtactacctgaccttcaacttcgacaacgagccagagaacatcagcatcgagaacctgagcagcgacatcatcggccagctggagctgatgccaaacatcgagagattcccaaacggcaagaagtacgagctggacaagtacaccatgttccactacctgagagcccaggagttcgagcacggcaagagcagaatcgccctgaccaacagcgtgaacgaggccctgctgaacccaagcagagtgtacaccttcttcagcagcgactacgtgaagaaggtgaacaaggccaccgaggccgccatgttcctgggctgggtggagcagctggtgtacgacttcaccgacgagaccagcgaggtgagcaccaccgacaagatcgccgacatcaccatcatcatcccatacatcggcccagccctgaacatcggcaacatgctgtacaaggacgacttcgtgggcgccctgatcttcagcggcgccgtgatcctgctggagttcatcccagagatcgccatcccagtgctgggcaccttcgccctggtgagctacatcgccaacaaggtgctgaccgtgcagaccatcgacaacgccctgagcaagagaaacgagaagtgggacgaggtgtacaagtacatcgtgaccaactggctggccaaggtgaacacccagatcgacctgatcagaaagaagatgaaggaggccctggagaaccaggccgaggccaccaaggccatcatcaactaccagtacaaccagtacaccgaggaggagaagaacaacatcaacttcaacatcgacgacctgagcagcaagctgaacgagagcatcaacaaggccatgatcaacatcaacaagttcctgaaccagtgcagcgtgagctacctgatgaacagcatgatcccatacggcgtgaagagactggaggacttcgacgccagcctgaaggacgccctgctgaagtacatctacgacaacagaggcaccctgatcggccaggtggacagactgaaggacaaggtgaacaacaccctgagcaccgacatcccattccagctgagcaagtacgtggacaaccagagactgctgagcaccttcaccgagtacatcaagaacatcatcaacaccagcatcctgaacctgagatacgagagcaaccacctgatcgacctgagcagatacgccagcaagatcaacatcggcagcaaggtgaacttcgacccaatcgacaagaaccagatccagctgttcaacctggagagcagcaagatcgaggtgatcctgaagaacgccatcgtgtacaacagcatgtacgagaacttcagcaccagcttctggatcagaatcccaaagtacttcaacagcatcagcctgaacaacgagtacaccatcatcaactgcatggagaacaacagcggctggaaggtgagcctgaactacggcgagatcatctggaccctgcaggacacccaggagatcaagcagagagtggtgttcaagtacagccagatgatcaacatcagcgactacatcaacagatggatcttcgtgaccatcaccaacaacagactgaacaacagcaagatctacatcaacggcagactgatcgaccagaagccaatcagcaacctgggcaacatccacgccagcaacaacatcatgttcaagctggacggctgcagagacacccacagatacatctggatcaagtacttcaacctgttcgacaaggagctgaacgagaaggagatcaaggacctgtacgacaaccagagcaacagcggcatcctgaaggacttctggggcgactacctgcagtacgacaagccatactacatgctgaacctgtacgacccaaacaagtacgtggacgtgaacaacgtgggcatcagaggctacatgtacctgaagggcccaagaggcagcgtgatgaccaccaacatctacctgaacagcagcctgtacagaggcaccaagttcatcatcaagaagtacgccagcggcaacaaggacaacatcgtgagaaacaacgacagagtgtacatcaacgtggtggtgaagaacaaggagtacagactggccaccaacgccagccaggccggcgtggagaagatcctgagcgccctggagatcccagacgtgggcaacctgagccaggtggtggtgatgaagagcaagaacgaccagggcatcaccaacaagtgcaagatgaacctgcaggacaacaacggcaacgacatcggcttcatcggcttccaccagttcaacaacatcgccaagctggtggccagcaactggtacaacagacagatcgagagaagcagcagaaccctgggctgcagctgggagttcatcccagtggacgacggctggggcgagagaccactgtga

SEQ ID NO: 96 - DNA, 3891 bp, Artificial Sequence
  BoNT/A,  C. aethiops-modified 3
atgccatttgttaacaagcagttcaactataaagatcctgtgaatggggttgacattgcctacatcaaaatccctaacgccggccagatgcagccagtgaaagcatttaagatccacaataaaatctgggtcattcctgaacgcgataccttcaccaaccctgaagagggagatctgaatcctccccctgaggctaagcaggttcccgtgtcttactatgatagcacctacctcagtaccgataacgaaaaggataattaccttaagggcgtgaccaaactcttcgagaggatttactctactgacctgggtagaatgttgctgactagcatcgttagaggaatccctttctggggcggatccaccatcgacacagaacttaaggtgatcgacacaaactgcatcaatgttattcagccagacggttcctatagaagcgaggaactgaatctggtgatcattgggccctctgcagacattatccaattcgagtgtaagtctttcggccacgaggtgctgaacctgacccgcaatggttacggcagcactcagtacatccgcttttctcctgacttcacttttggattcgaagagtccctggaggtcgataccaaccctcttctgggcgctggcaagttcgccacggaccccgctgtgacactggcccacgagttgatccatgctggacacagactgtacggcattgccattaaccccaaccgcgtgttcaaagtgaatactaacgcctactatgagatgagtggtctggaagtgtccttcgaagagctcaggaccttcgggggtcacgacgccaaatttatcgactcacttcaagaaaatgagttcaggctgtattactataataagttcaaagatatcgccagtacactcaacaaggcaaaatctatcgtcggcacgacagcctctctccaatacatgaaaaatgtcttcaaggagaaatacctcttgagcgaagacacgagcggaaaattctccgtggataaactcaaattcgacaaactttataagatgctgacggaaatctatacagaagacaatttcgtgaaatttttcaaagttctgaataggaagacctatctgaactttgacaaggcagttttcaagatcaacattgtccccaaagtgaactatactatctacgatggctttaacttgcgaaatactaatctggccgctaattttaacggacaaaatactgaaatcaataacatgaattttacaaaactgaaaaactttacgggccttttcgagttctataaactcctgtgtgtccgcggtatcattacttctaaaacgaaaagtctggataagggatataacaaggctctcaacgacctgtgcattaaggttaacaattgggacttgttctttagtccaagcgaagacaacttcactaatgatcttaacaaaggcgaggaaatcaccagcgacacgaacattgaagccgcagaggaaaatatctctctcgaccttatccagcaatattacttgacattcaactttgacaacgaaccagagaatatttccatcgagaatttgtcctcagacatcattggccagttggaactgatgccaaatatcgagaggtttcccaacggcaaaaagtatgagctggacaagtatacgatgtttcactacctgcgcgctcaggaatttgagcatgggaagagccgcattgccctgaccaacagcgtcaacgaagccctgttgaatccaagtcgtgtgtacacatttttcagtagcgactacgtgaagaaagtgaataaagctactgaggccgcaatgtttctggggtgggtcgaacagctggtgtatgattttaccgacgagacctctgaggtgagcacaacggacaaaatcgctgacatcacaatcattatcccctacatcggtccagcactgaatatcgggaatatgctgtacaaggacgatttcgtcggcgcactcattttctccggcgctgtcatcctgttggagtttatccctgaaatcgccattccagtgctggggacatttgccctggttagctatatcgctaataaggtgctgaccgtgcaaacaattgataatgccctgtctaaacggaacgaaaaatgggatgaggtgtacaagtatatcgtgacaaactggcttgccaaagtgaacacacagattgatctcatccggaagaaaatgaaggaggcactcgagaaccaggccgaagccactaaagcaatcattaactatcagtacaaccagtataccgaggaagagaagaataacatcaactttaacatcgacgatctttcctctaagcttaacgagtccatcaacaaggccatgattaatattaataaatttctgaaccaatgcagcgtttcatacctgatgaatagtatgatcccctacggagtcaagagactggaggacttcgatgcctctttgaaggatgctcttctcaagtatatctatgacaacagagggacactgattgggcaggtggatcgcctcaaagataaagttaacaatacactgagtactgatattccctttcaactcagcaaatatgtggataatcaacggcttctctcaaccttcaccgagtacattaagaatattatcaacactagcattctgaacctcaggtacgaaagcaaccatttgattgacctgtcccgttatgcatcaaagatcaatattggctcaaaggtgaacttcgatccaatcgacaaaaatcagatccagttgttcaacctggagtcctctaagattgaagttatccttaagaacgctatcgtgtacaacagcatgtatgagaatttttctacatcattttggattcgtatccccaaatattttaattcaatcagcctcaataacgagtatacgatcattaactgcatggagaataactcaggttggaaagtgagcctgaactacggcgagatcatttggacgctgcaggatactcaggaaatcaagcagcgagttgtgtttaagtactcccagatgattaacatcagcgattacatcaatcggtggatcttcgtgacgatcaccaacaatagactgaataactccaagatttatatcaatggcagactgattgatcagaaaccaatctccaatctgggcaatatccatgcaagtaataacatcatgttcaagctggatggatgtagggacacccacagatacatctggattaagtattttaacctgtttgataaggagcttaatgaaaaggagatcaaggatctttacgacaatcagtccaattcaggaatcctgaaagatttctggggtgactacctgcagtacgacaagccatactatatgctgaatctgtatgacccaaataagtacgtggatgttaacaatgtggggatccgagggtacatgtatctcaagggaccacgtggtagtgtgatgacaaccaacatctacctgaacagctctctctaccgaggcacaaagttcatcattaagaaatacgcctctggaaataaggacaatattgtgcggaacaatgatcgagtctacatcaacgttgtcgtgaagaacaaggaatatcggctcgccacaaatgcttcacaggccggggtggagaaaatcctgagcgctcttgagatcccagatgtcgggaatctgtcccaggtcgtcgtcatgaagagtaaaaacgatcaaggcatcaccaacaagtgtaagatgaacctgcaagacaacaatgggaacgacattgggttcatcggattccatcaattcaacaacatcgctaaactggtcgccagcaactggtataaccggcagatcgagcggtcatccaggactctgggatgctcatgggagtttatcccagtcgacgatgggtggggagagagacccttgtga

SEQ ID NO: 97 - DNA, 3891 bp, Artificial Sequence
  BoNT/A,  H. sapiens-modified 1
atgccgtttgtgaataagcagttcaactataaggatcctgtgaacggtgtggacatcgcttatattaagatcccaaatgcaggccagatgcagcccgtgaaggcttttaagatacacaacaaaatctgggtcatcccagagcgcgacacattcacgaatccagaagagggcgacctcaatccccctccagaagctaaacaggtcccagtgagttattacgacagtacctatttgtccactgataacgagaaagacaattatctgaagggcgtgacaaagctgttcgaaagaatatacagtaccgatctcgggagaatgctcctgacatccattgtccgggggattccgttttggggtggaagtaccatcgacaccgaactgaaggtgattgatacaaactgtataaacgttatccagcccgacggaagctataggtccgaggaactgaatctggtgatcattggaccttctgccgacattatccagttcgaatgtaagtccttcggccatgaggttctgaacctgactcgcaacggatacgggagtacccaatatattagattctcccccgactttaccttcggatttgaagagtcactcgaggtggacacgaatcccctccttggagctgggaaatttgccaccgatccagccgtgactctggcccatgaactcatacacgccgggcataggctgtacgggatcgcaatcaatcccaatcgagtttttaaggtcaatactaacgcatactatgaaatgtccgggctggaggtctcatttgaagagcttcgaacatttggcgggcacgatgccaaattcatcgactctctgcaggaaaatgagttcagactgtattactataataaattcaaagatatcgcctccacactcaacaaggccaaatccatcgtgggtacaactgctagcctgcagtacatgaagaatgtgtttaaagagaaataccttctctctgaagataccagcgggaaattttctgtcgataagctcaagtttgacaagctttacaaaatgctgacagaaatctacacagaagataacttcgtaaagttctttaaagtattgaaccgcaaaacctatttgaactttgacaaggcagtcttcaaaattaacatcgtgcctaaagtcaactatactatctatgacggttttaatctgcgtaatactaacctggctgcaaactttaacggtcagaacaccgaaatcaataacatgaacttcacaaaactgaagaatttcacggggctgtttgagttctataagctgttgtgcgttcgtggcatcattacatccaaaactaagtcattggacaaaggctataataaagctctgaatgacctctgcatcaaggtgaacaattgggacctgttctttagcccttccgaagacaattttacgaatgacctgaataagggcgaggaaatcacatctgataccaacattgaggccgcagaggaaaacatatcccttgacctgattcaacagtactatttgaccttcaacttcgataatgagcccgaaaatatcagcattgaaaacctttcctctgacatcattggtcagctggaactgatgccaaatattgaaaggtttccgaatggaaaaaagtacgagcttgataagtacacgatgttccattacctcagggcacaagagttcgagcacggaaagtcccgcatcgcactgactaactctgtcaatgaggccctgctcaacccatctagagtctacacttttttctccagcgactacgtaaagaaagtgaacaaggccaccgaggctgcaatgtttctgggctgggtcgaacagctggtatacgacttcacagatgagacaagcgaagtctccactaccgacaaaattgccgacattactattatcattccatacattggacctgctctgaacatcggcaatatgctttacaaagatgacttcgtgggggcactgatattctccggcgctgtgatcttgctggagtttattcctgagattgcaatccccgtgctgggtaccttcgctctcgtgtcttacattgctaataaagtgctgacggtgcagacgatcgataatgccctctctaaaagaaatgagaagtgggatgaagtgtacaagtacattgtgacaaactggctcgccaaagtaaacacacagatcgacctgatacgaaagaaaatgaaagaggccctggagaatcaagccgaggccaccaaggccatcattaactaccaatacaatcagtacactgaggaagagaagaataacattaacttcaatatcgatgacctttcttcaaaactgaatgagagcatcaataaggccatgataaatattaacaaattcctgaatcaatgttctgttagttacctgatgaatagcatgatcccttacggcgtgaagaggcttgaggatttcgacgcctcactgaaggatgctctgcttaagtatatctacgataataggggcaccttgatcgggcaggtagataggctgaaggataaggtgaacaatactttgtcaaccgatatcccatttcaactgagcaagtatgtggataaccagcgcctgttgtctacattcacagagtatatcaaaaacatcattaacacttcaattttgaacctgaggtatgaatcaaaccacttgattgacctcagcagatacgcttctaagataaatattggaagtaaggttaacttcgacccgatcgataagaaccagatccagctgtttaatttggagtccagtaaaatcgaagtcatactgaaaaacgccatcgtttataacagtatgtacgagaatttttctaccagcttctggatacgcattcccaagtactttaactctatctccctgaataacgagtataccattatcaattgcatggagaataactctggttggaaagtttcactcaattatggagaaattatctggaccctgcaggatacgcaggaaatcaagcagcgggtagtcttcaagtacagccagatgattaacatttctgactacattaaccgatggatcttcgtcaccataaccaataaccgcctgaacaattccaaaatttacataaacggtcgcctgatcgatcagaagcctataagcaacctgggcaacatccatgccagcaacaatataatgtttaagctcgatggatgtcgggacacacacagatatatttggataaagtattttaacttgtttgataaggagctcaacgagaaagagatcaaagacctgtacgacaatcagtccaatagcggaattctgaaggatttttggggtgattatctccagtatgacaaaccctactatatgctcaacctgtacgaccccaataaatacgttgatgtgaacaatgttgggatacggggctatatgtatcttaagggcccaaggggtagcgttatgactaccaacatttatcttaacagcagtctgtatcggggaaccaagttcattatcaaaaagtacgcatccggcaataaggataatatcgtccgaaacaatgatagagtgtacatcaacgtagtggtcaagaacaaagagtaccggcttgctaccaatgccagtcaggctggcgtggagaaaattctgagtgcactggagattcctgacgttggcaacttgagtcaggtggttgtgatgaagtccaagaacgaccaaggaatcactaataagtgcaagatgaacctgcaagacaataacggcaacgacataggcttcataggattccaccaattcaacaatatagctaaattggtggcctcaaactggtataaccggcagatcgaacggtcctcacgtacactgggttgctcatgggagtttatccccgtggacgatggctggggtgagcggcctctttga

SEQ ID NO: 98 - DNA, 3891 bp, Artificial Sequence
  BoNT/A,  H. sapiens-modified 2
atgcccttcgtgaacaagcagttcaactacaaggaccccgtgaacggcgtggacatcgcctacatcaagatccccaacgccggccagatgcagcccgtgaaggccttcaagatccacaacaagatctgggtgatccccgagagagacaccttcaccaaccccgaggagggcgacctgaaccccccccccgaggccaagcaggtgcccgtgtcctactacgactccacctacctgtccaccgacaacgagaaggacaactacctgaagggcgtgaccaagctgttcgagagaatctactccaccgacctgggcagaatgctgctgacctccatcgtgagaggcatccccttctggggcggctccaccatcgacaccgagctgaaggtgatcgacaccaactgcatcaacgtgatccagcccgacggctcctacagatccgaggagctgaacctggtgatcatcggcccctccgccgacatcatccagttcgagtgcaagtccttcggccacgaggtgctgaacctgaccagaaacggctacggctccacccagtacatcagattctcccccgacttcaccttcggcttcgaggagtccctggaggtggacaccaaccccctgctgggcgccggcaagttcgccaccgaccccgccgtgaccctggcccacgagctgatccacgccggccacagactgtacggcatcgccatcaaccccaacagagtgttcaaggtgaacaccaacgcctactacgagatgtccggcctggaggtgtccttcgaggagctgagaaccttcggcggccacgacgccaagttcatcgactccctgcaggagaacgagttcagactgtactactacaacaagttcaaggacatcgcctccaccctgaacaaggccaagtccatcgtgggcaccaccgcctccctgcagtacatgaagaacgtgttcaaggagaagtacctgctgtccgaggacacctccggcaagttctccgtggacaagctgaagttcgacaagctgtacaagatgctgaccgagatctacaccgaggacaacttcgtgaagttcttcaaggtgctgaacagaaagacctacctgaacttcgacaaggccgtgttcaagatcaacatcgtgcccaaggtgaactacaccatctacgacggcttcaacctgagaaacaccaacctggccgccaacttcaacggccagaacaccgagatcaacaacatgaacttcaccaagctgaagaacttcaccggcctgttcgagttctacaagctgctgtgcgtgagaggcatcatcacctccaagaccaagtccctggacaagggctacaacaaggccctgaacgacctgtgcatcaaggtgaacaactgggacctgttcttctccccctccgaggacaacttcaccaacgacctgaacaagggcgaggagatcacctccgacaccaacatcgaggccgccgaggagaacatctccctggacctgatccagcagtactacctgaccttcaacttcgacaacgagcccgagaacatctccatcgagaacctgtcctccgacatcatcggccagctggagctgatgcccaacatcgagagattccccaacggcaagaagtacgagctggacaagtacaccatgttccactacctgagagcccaggagttcgagcacggcaagtccagaatcgccctgaccaactccgtgaacgaggccctgctgaacccctccagagtgtacaccttcttctcctccgactacgtgaagaaggtgaacaaggccaccgaggccgccatgttcctgggctgggtggagcagctggtgtacgacttcaccgacgagacctccgaggtgtccaccaccgacaagatcgccgacatcaccatcatcatcccctacatcggccccgccctgaacatcggcaacatgctgtacaaggacgacttcgtgggcgccctgatcttctccggcgccgtgatcctgctggagttcatccccgagatcgccatccccgtgctgggcaccttcgccctggtgtcctacatcgccaacaaggtgctgaccgtgcagaccatcgacaacgccctgtccaagagaaacgagaagtgggacgaggtgtacaagtacatcgtgaccaactggctggccaaggtgaacacccagatcgacctgatcagaaagaagatgaaggaggccctggagaaccaggccgaggccaccaaggccatcatcaactaccagtacaaccagtacaccgaggaggagaagaacaacatcaacttcaacatcgacgacctgtcctccaagctgaacgagtccatcaacaaggccatgatcaacatcaacaagttcctgaaccagtgctccgtgtcctacctgatgaactccatgatcccctacggcgtgaagagactggaggacttcgacgcctccctgaaggacgccctgctgaagtacatctacgacaacagaggcaccctgatcggccaggtggacagactgaaggacaaggtgaacaacaccctgtccaccgacatccccttccagctgtccaagtacgtggacaaccagagactgctgtccaccttcaccgagtacatcaagaacatcatcaacacctccatcctgaacctgagatacgagtccaaccacctgatcgacctgtccagatacgcctccaagatcaacatcggctccaaggtgaacttcgaccccatcgacaagaaccagatccagctgttcaacctggagtcctccaagatcgaggtgatcctgaagaacgccatcgtgtacaactccatgtacgagaacttctccacctccttctggatcagaatccccaagtacttcaactccatctccctgaacaacgagtacaccatcatcaactgcatggagaacaactccggctggaaggtgtccctgaactacggcgagatcatctggaccctgcaggacacccaggagatcaagcagagagtggtgttcaagtactcccagatgatcaacatctccgactacatcaacagatggatcttcgtgaccatcaccaacaacagactgaacaactccaagatctacatcaacggcagactgatcgaccagaagcccatctccaacctgggcaacatccacgcctccaacaacatcatgttcaagctggacggctgcagagacacccacagatacatctggatcaagtacttcaacctgttcgacaaggagctgaacgagaaggagatcaaggacctgtacgacaaccagtccaactccggcatcctgaaggacttctggggcgactacctgcagtacgacaagccctactacatgctgaacctgtacgaccccaacaagtacgtggacgtgaacaacgtgggcatcagaggctacatgtacctgaagggccccagaggctccgtgatgaccaccaacatctacctgaactcctccctgtacagaggcaccaagttcatcatcaagaagtacgcctccggcaacaaggacaacatcgtgagaaacaacgacagagtgtacatcaacgtggtggtgaagaacaaggagtacagactggccaccaacgcctcccaggccggcgtggagaagatcctgtccgccctggagatccccgacgtgggcaacctgtcccaggtggtggtgatgaagtccaagaacgaccagggcatcaccaacaagtgcaagatgaacctgcaggacaacaacggcaacgacatcggcttcatcggcttccaccagttcaacaacatcgccaagctggtggcctccaactggtacaacagacagatcgagagatcctccagaaccctgggctgctcctgggagttcatccccgtggacgacggctggggcgagagacccctgtga

SEQ ID NO: 99 - DNA, 3891 bp, Artificial Sequence
  BoNT/A,  H. sapiens-modified 3
atgccctttgtgaataagcagtttaattataaggatccagtcaacggcgttgatatcgcctacataaaaatccctaacgccggccagatgcagccagttaaggccttcaagattcacaataaaatctgggttatcccagagagggacacctttaccaaccctgaggagggcgatctgaatccaccccctgaggccaagcaggtgcctgtgtcctattacgactccacctatctgtccaccgacaacgagaaggataattacctgaagggcgtcaccaagctgtttgagagaatatactccacagatctgggccggatgctgctgacttccatagtgagaggcatccccttttggggcggctccaccatagataccgagctgaaagttatagacaccaactgcatcaacgtcatccagcccgatggctcctataggtccgaggagctgaatctggtgatcattggcccatccgccgatattatccaattcgagtgcaaatcctttggccacgaggtcctgaatctgacaagaaatggctacggctccacacagtatattcgattttcccctgattttacattcggctttgaggagtccctggaggtggacaccaatcccctgctgggcgccggcaaatttgccaccgacccagccgtgaccctggcccatgagctgatccacgccggccaccgcctgtacggcattgccatcaatcccaatagggtgtttaaggtcaacaccaacgcctactatgagatgtccggcctggaggtgtcctttgaggagctgcgaacctttggcggccatgatgccaagttcattgactccctgcaggagaatgagttccgcctgtactattacaataaatttaaagatattgcctccacactgaataaggccaagtccattgtgggcaccacagcctccctgcaatacatgaagaacgtgttcaaggagaagtacctgctgtccgaggacacatccggcaaattttccgtggacaagctgaagtttgacaagctgtacaaaatgctgactgagatttatactgaggataacttcgtgaagttctttaaagtgctgaaccgcaaaacctacctgaattttgacaaggccgtttttaaaattaacatagtgccaaaggtgaactacacaatttatgacggcttcaacctgcggaacaccaacctggccgccaacttcaatggccagaacacagagatcaacaatatgaattttacaaagctgaagaacttcaccggcctgttcgagttctacaagctgctgtgcgtgaggggcattatcacctccaaaactaagtccctggataagggctacaacaaggccctgaacgacctgtgcatcaaagtcaataactgggacctgtttttctccccttccgaggataactttaccaatgacctgaataaaggcgaggagataacttccgacactaacatcgaggccgccgaggagaatatttccctggatctgattcagcaatactatctgaccttcaacttcgacaatgagcccgagaacatttccatcgagaatctgtcctccgatatcattggccagctggagctgatgcccaacattgagcgattccccaatggcaagaaatacgagctggataagtataccatgttccactatctgagggcccaggagttcgagcatggcaaatccagaatcgccctgactaactccgtcaatgaggccctgctgaatccttccagagtctatactttcttttcctccgactacgtgaaaaaggtgaataaagccaccgaggccgccatgttcctgggctgggtcgagcagctggtgtatgacttcactgatgagacctccgaggtctccaccactgacaaaatcgccgacataacaataattatcccctacatcggccctgccctgaatatcggcaatatgctgtataaggatgacttcgtgggcgccctgattttctccggcgccgtgatcctgctggagttcattccagagatcgccatccctgtgctgggcactttcgccctggtgtcctatatcgccaacaaggtcctgacagtgcagaccatcgacaatgccctgtccaaaaggaatgagaaatgggacgaggtttataagtatatcgtgactaactggctggccaaggtgaacactcagattgatctgatacgcaagaaaatgaaggaggccctggagaaccaggccgaggccacaaaggccattataaactatcaatacaaccagtacacagaggaggagaaaaataacatcaatttcaatatcgacgatctgtcctccaagctgaatgagtccatcaacaaagccatgataaatatcaataagttcctgaaccagtgttccgtctcctatctgatgaactccatgattccctacggcgtgaaacgcctggaggacttcgacgcctccctgaaagacgccctgctgaaatacatttacgataacagaggcacactgattggccaagtggatagactgaaagacaaagtgaacaataccctgtccactgacattccctttcagctgtccaagtacgttgacaatcagaggctgctgtccaccttcaccgagtacatcaagaacatcattaatacttccatactgaacctgcggtatgagtccaatcatctgatcgatctgtccagatatgcctccaagataaatatcggctccaaggttaattttgatcctattgacaagaatcaaatacaactgtttaacctggagtcctccaaaattgaggttatcctgaaaaacgccatcgtgtacaactccatgtatgagaacttctccacctccttctggatacggatcccaaagtattttaactccatatccctgaataacgagtacacaatcattaattgcatggagaacaattccggctggaaggtgtccctgaactacggcgagatcatttggacactgcaggatacccaggagataaagcagcgagtggtctttaaatattcccagatgatcaacatttccgattacattaacaggtggatttttgtcaccatcaccaacaatcgcctgaataactccaaaatttatatcaacggccggctgatcgatcagaaacccatctccaatctgggcaatatccacgcctccaacaatataatgttcaagctggatggctgtagagacacccatagatatatttggattaagtatttcaacctgtttgacaaggagctgaacgagaaagagattaaggacctgtatgataatcaatccaactccggcatcctgaaggatttctggggcgattacctgcagtacgacaaaccatactatatgctgaacctgtacgatcccaacaagtacgttgacgtcaacaatgtgggcatccgcggctatatgtacctgaaaggccctaggggctccgtgatgactaccaacatctacctgaactcctccctgtaccggggcacaaagttcatcataaagaaatacgcctccggcaacaaagataatattgtccgcaataacgacagagtgtatatcaatgtggtcgttaaaaacaaggagtatagactggccacaaacgcctcccaggccggcgttgagaaaattctgtccgccctggagatccccgacgttggcaatctgtcccaagtggtggtgatgaagtccaagaacgaccagggcattacaaataaatgtaaaatgaatctgcaggataacaatggcaatgacatcggctttattggctttcaccaattcaacaatatcgccaagctggtggcctccaactggtacaaccgacagattgagcggtcctcccggactctgggctgttcctgggagttcatcccagtggacgatggctggggcgagcggcccctgtga

SEQ ID NO: 100 - DNA, 54 bp, Artificial Sequence
  Synthetic DNA oligonucleotide used as sense primer for H227Y site-directed mutagenesis
gtgaccttggcacatgaacttatttatgccgggcatcgcttgtatggaatcgcc

SEQ ID NO: 101 - DNA, 54 bp, Artificial Sequence
  Synthetic DNA oligonucleotide used as antisense primer for H227Y site-directed mutagenesis
ggcgattccatacaagcgatgcccggcataaataagttcatgtgccaaggtcac

SEQ ID NO: 102 - DNA, 54 bp, Artificial Sequence
  Synthetic DNA oligonucleotide used as sense primer for Y227H site-directed mutagenesis
gtgaccttggcacatgaacttattcatgccgggcatcgcttgtatggaatcgcc

SEQ ID NO: 103 - DNA, 54 bp, Artificial Sequence
  Synthetic DNA oligonucleotide used as antisense primer for Y227H site-directed mutagenesis
ggcgattccatacaagcgatgcccggcatgaataagttcatgtgccaaggtcac

SEQ ID NO: 104 - DNA, 38 bp, Artificial Sequence
  SL103 sense primer to remove first NdeI restriction endonuclease site
gatgaactcgatgatcccttacggtgtgaaacgtctgg

SEQ ID NO: 105 - DNA, 38 bp, Artificial Sequence
  SL103 antisense primer to remove first NdeI restriction endonuclease site
ccagacgtttcacaccgtaagggatcatcgagttcatc

SEQ ID NO: 106 - DNA, 38 bp, Artificial Sequence; identical to SEQ ID NO: 105
  SL104 sense primer to remove second NdeI restriction endonuclease site

SEQ ID NO: 107 - DNA, 38 bp, Artificial Sequence; identical to SEQ ID NO: 104
  SL104 antiense primer to remove second NdeI restriction endonuclease site

SEQ ID NO: 108 - DNA, 30 bp, Artificial Sequence
  SL101 NdeI sense primer for PCR
cgccatatgccgttcgtaaacaaacagttc

SEQ ID NO: 109 - DNA, 42 bp, Artificial Sequence
  SL101 HindII, lysine addition antisense primer for PCR
cccaagcttgtcgactttcaatgggcgttctccccaaccgtc

SEQ ID NO: 110 - DNA, 4005 bp, Artificial Sequence
  His-BoNT/A, E. coli-modiefied
atgcggggttctcatcatcatcatcatcatggtatggctagcatgactggtggacagcaaatgggtcgggatctgtacgacgatgacgataaggatccgaattcgagctcccatatgccgttcgtaaacaaacagttcaactataaagacccagtcaacggcgtggacattgcctatatcaaaatcccgaatgcgggtcaaatgcagcccgtgaaagcatttaaaatccataacaaaatttgggtgatcccggagcgcgatacgttcacgaacccggaagaaggagatttaaacccaccgcctgaggctaaacaggtcccggtgtcttactatgatagcacatacctgagtaccgacaatgaaaaggacaactacctgaaaggtgttaccaaactgttcgagcgcatttattcgacagatctcggtcgcatgttgctgacttctattgtgcgcggcattccgttttggggtggtagcaccatcgatacagaactcaaagtgattgacaccaactgcatcaatgtgattcagcctgatgggagctaccggtccgaagagcttaacctcgtaatcattggcccgagcgcggatattatccaattcgaatgtaaatcttttgggcatgaagtcctgaatctgacgcggaatggctatggatcgacgcagtatattcgtttttctccagatttcacatttggatttgaagaaagcctcgaagttgatacgaaccctcttttaggcgcgggaaaattcgcgacggacccagcggtgaccttggcacatgaacttattcatgccgggcatcgcttgtatggaatcgccattaacccgaaccgtgttttcaaggtgaatacgaacgcgtattacgagatgtcgggcttagaagtgtcctttgaagaactgcgcacgtttggcggtcatgatgcaaaatttattgatagtctgcaagaaaacgaatttcggctgtactattacaataaattcaaagacattgcatcaaccttaaacaaggcgaaaagcattgtgggtaccacggctagcttacaatatatgaaaaacgttttcaaagaaaaatacctccttagcgaagacacttccggcaaattctctgtcgataaactgaaatttgataaactgtataaaatgctcaccgagatctacacagaggataactttgtcaaattcttcaaggtcttgaatcggaaaacctatctgaacttcgataaagccgtctttaagatcaacatcgtaccgaaagttaactacaccatctatgatggctttaatctgcgcaatacgaatctggcggcgaactttaacggccagaacaccgaaatcaacaacatgaactttactaaactgaaaaattttaccggcttgtttgaattttataagctcctgtgtgtccgcggtattatcaccagcaaaaccaaatccttggataagggctataacaaggcgctcaatgatttatgcatcaaggtgaacaactgggacttgtttttctctccatctgaagataattttactaacgacttgaacaaaggagaggaaattacttccgataccaacatcgaagcagcggaagagaatattagcctggatcttattcaacaatattacctgacctttaattttgataacgagcctgagaacatttccattgagaatctcagctctgacatcatcggccagctggaactgatgccgaatatcgaacgctttcctaatggaaagaaatatgaattggacaaatacaccatgttccactatctccgcgcgcaggagtttgagcacggcaagtctcgtattgctctgaccaattcggtaaacgaagcccttttaaatccttcgcgtgtgtacacctttttctcaagcgattatgttaaaaaagtgaacaaggcgaccgaagcggcgatgtttttgggatgggtggaacaactggtatatgactttacggatgaaacttctgaagtctcgaccaccgacaaaattgccgatattaccattatcattccctatattggccctgcactgaacattggtaacatgctgtataaagatgattttgtgggcgccctgatcttttcaggcgctgttatcctgctggaatttatcccggaaatcgccattccagtactcggtacctttgcgctggtgtcctatatcgcaaacaaagttttgactgtccagacgatcgacaacgcgctcagtaaacgtaacgaaaaatgggatgaggtgtataagtatattgttaccaactggctcgctaaagtaaacacccagattgacctgattcgcaagaagatgaaagaagcgctggaaaaccaagcagaagcgaccaaagctattatcaactatcaatataaccagtacacagaggaagaaaagaataacatcaacttcaacatcgacgacttatcttcaaagctgaatgaatctattaacaaagcgatgattaatattaacaagttcttgaaccaatgtagtgtcagctatctgatgaactcgatgatcccatatggtgtgaaacgtctggaagacttcgatgcaagccttaaagatgcccttctgaagtatatttacgataatcgcggaactcttattggccaagtggatcgcttaaaagataaagtcaacaacacgctgagtacagacatcccttttcagctgtctaaatatgtggacaatcagcgcctgctgtccacgtttacggaatacatcaaaaacatcatcaacactagtattctgaacttgcgttacgagagtaaccatctgattgatctgagccgttacgcatctaaaatcaacatcggctcgaaggtgaacttcgatcctatcgacaaaaaccagattcaattgttcaacttagaatcgtcaaagattgaagttatcttaaaaaatgcgattgtatataattcaatgtacgaaaatttctctacgagcttttggattcgtattccgaaatatttcaacagtatctctttaaacaacgagtatactatcatcaattgtatggagaataacagcgggtggaaagtgagccttaactatggtgaaatcatctggactctgcaggacactcaagaaattaaacaacgcgtggtgtttaaatactcacagatgattaacatctcggattatattaatcgctggatttttgtgacaattactaacaaccggctgaacaacagcaaaatttacattaacggtcgcctgatcgatcagaaaccaatcagtaatctcggtaacattcacgcatcgaataatatcatgttcaaactggatggttgtcgcgacacgcaccgttacatttggatcaaatacttcaatttattcgacaaagaactcaacgaaaaggagattaaggatctttatgacaatcagtctaattcgggtattctgaaagacttttggggtgattaccttcagtacgataaaccgtattatatgttaaacttatatgatccgaataaatacgttgacgtcaacaacgttggcattcgtggctatatgtatctgaaagggccgcgtggcagcgtgatgaccactaacatttacttaaactcctccctctatcgcggtactaaatttattatcaagaaatatgcctctggcaacaaggacaatatcgtacgcaataacgatcgcgtctacattaacgtggtggtgaagaataaagaatatcgtctggcgaccaatgctagtcaggcgggcgtggagaaaattctgtctgcacttgaaatcccggatgtgggtaatttatcccaggtggttgtgatgaaaagtaaaaatgaccaagggatcaccaataaatgcaaaatgaatctgcaagataacaacggcaacgacattggttttatcggcttccaccaattcaataatatcgcgaaactggtggcctcaaattggtacaaccgtcagattgagcgcagctcccgcactttaggctgtagctgggagttcattccggtagatgacggttggggagaacgcccattgtaa

SEQ ID NO: 111 - protein, 1334 aa, Artificial Sequence
  His-BoNT/A, E. coli-modiefied
MRGSHHHHHHGMASMTGGQQMGRDLYDDDDKDPNSSSHMPFVNKQFNYKDPVNGVDIAYIKIPNAGQMQPVKAFKIHNKIWVIPERDTFTNPEEGDLNPPPEAKQVPVSYYDSTYLSTDNEKDNYLKGVTKLFERIYSTDLGRMLLTSIVRGIPFWGGSTIDTELKVIDTNCINVIQPDGSYRSEELNLVIIGPSADIIQFECKSFGHEVLNLTRNGYGSTQYIRFSPDFTFGFEESLEVDTNPLLGAGKFATDPAVTLAHELIHAGHRLYGIAINPNRVFKVNTNAYYEMSGLEVSFEELRTFGGHDAKFIDSLQENEFRLYYYNKFKDIASTLNKAKSIVGTTASLQYMKNVFKEKYLLSEDTSGKFSVDKLKFDKLYKMLTEIYTEDNFVKFFKVLNRKTYLNFDKAVFKINIVPKVNYTIYDGFNLRNTNLAANFNGQNTEINNMNFTKLKNFTGLFEFYKLLCVRGIITSKTKSLDKGYNKALNDLCIKVNNWDLFFSPSEDNFTNDLNKGEEITSDTNIEAAEENISLDLIQQYYLTFNFDNEPENISIENLSSDIIGQLELMPNIERFPNGKKYELDKYTMFHYLRAQEFEHGKSRIALTNSVNEALLNPSRVYTFFSSDYVKKVNKATEAAMFLGWVEQLVYDFTDETSEVSTTDKIADITIIIPYIGPALNIGNMLYKDDFVGALIFSGAVILLEFIPEIAIPVLGTFALVSYIANKVLTVQTIDNALSKRNEKWDEVYKYIVTNWLAKVNTQIDLIRKKMKEALENQAEATKAIINYQYNQYTEEEKNNINFNIDDLSSKLNESINKAMININKFLNQCSVSYLMNSMIPYGVKRLEDFDASLKDALLKYIYDNRGTLIGQVDRLKDKVNNTLSTDIPFQLSKYVDNQRLLSTFTEYIKNIINTSILNLRYESNHLIDLSRYASKINIGSKVNFDPIDKNQIQLFNLESSKIEVILKNAIVYNSMYENFSTSFWIRIPKYFNSISLNNEYTIINCMENNSGWKVSLNYGEIIWTLQDTQEIKQRVVFKYSQMINISDYINRWIFVTITNNRLNNSKIYINGRLIDQKPISNLGNIHASNNIMFKLDGCRDTHRYIWIKYFNLFDKELNEKEIKDLYDNQSNSGILKDFWGDYLQYDKPYYMLNLYDPNKYVDVNNVGIRGYMYLKGPRGSVMTTNIYLNSSLYRGTKFIIKKYASGNKDNIVRNNDRVYINVVVKNKEYRLATNASQAGVEKILSALEIPDVGNLSQVVVMKSKNDQGITNKCKMNLQDNNGNDIGFIGFHQFNNIAKLVASNWYNRQIERSSRTLGCSWEFIPVDDGWGERPL

SEQ ID NO: 112 - DNA, 3939 bp, Artificial Sequence
  BoNT/A-KHis, E. coli-modified
atgccgttcgtaaacaaacagttcaactataaagacccagtcaacggcgtggacattgcctatatcaaaatcccgaatgcgggtcaaatgcagcccgtgaaagcatttaaaatccataacaaaatttgggtgatcccggagcgcgatacgttcacgaacccggaagaaggagatttaaacccaccgcctgaggctaaacaggtcccggtgtcttactatgatagcacatacctgagtaccgacaatgaaaaggacaactacctgaaaggtgttaccaaactgttcgagcgcatttattcgacagatctcggtcgcatgttgctgacttctattgtgcgcggcattccgttttggggtggtagcaccatcgatacagaactcaaagtgattgacaccaactgcatcaatgtgattcagcctgatgggagctaccggtccgaagagcttaacctcgtaatcattggcccgagcgcggatattatccaattcgaatgtaaatcttttgggcatgaagtcctgaatctgacgcggaatggctatggatcgacgcagtatattcgtttttctccagatttcacatttggatttgaagaaagcctcgaagttgatacgaaccctcttttaggcgcgggaaaattcgcgacggacccagcggtgaccttggcacatgaacttattcatgccgggcatcgcttgtatggaatcgccattaacccgaaccgtgttttcaaggtgaatacgaacgcgtattacgagatgtcgggcttagaagtgtcctttgaagaactgcgcacgtttggcggtcatgatgcaaaatttattgatagtctgcaagaaaacgaatttcggctgtactattacaataaattcaaagacattgcatcaaccttaaacaaggcgaaaagcattgtgggtaccacggctagcttacaatatatgaaaaacgttttcaaagaaaaatacctccttagcgaagacacttccggcaaattctctgtcgataaactgaaatttgataaactgtataaaatgctcaccgagatctacacagaggataactttgtcaaattcttcaaggtcttgaatcggaaaacctatctgaacttcgataaagccgtctttaagatcaacatcgtaccgaaagttaactacaccatctatgatggctttaatctgcgcaatacgaatctggcggcgaactttaacggccagaacaccgaaatcaacaacatgaactttactaaactgaaaaattttaccggcttgtttgaattttataagctcctgtgtgtccgcggtattatcaccagcaaaaccaaatccttggataagggctataacaaggcgctcaatgatttatgcatcaaggtgaacaactgggacttgtttttctctccatctgaagataattttactaacgacttgaacaaaggagaggaaattacttccgataccaacatcgaagcagcggaagagaatattagcctggatcttattcaacaatattacctgacctttaattttgataacgagcctgagaacatttccattgagaatctcagctctgacatcatcggccagctggaactgatgccgaatatcgaacgctttcctaatggaaagaaatatgaattggacaaatacaccatgttccactatctccgcgcgcaggagtttgagcacggcaagtctcgtattgctctgaccaattcggtaaacgaagcccttttaaatccttcgcgtgtgtacacctttttctcaagcgattatgttaaaaaagtgaacaaggcgaccgaagcggcgatgtttttgggatgggtggaacaactggtatatgactttacggatgaaacttctgaagtctcgaccaccgacaaaattgccgatattaccattatcattccctatattggccctgcactgaacattggtaacatgctgtataaagatgattttgtgggcgccctgatcttttcaggcgctgttatcctgctggaatttatcccggaaatcgccattccagtactcggtacctttgcgctggtgtcctatatcgcaaacaaagttttgactgtccagacgatcgacaacgcgctcagtaaacgtaacgaaaaatgggatgaggtgtataagtatattgttaccaactggctcgctaaagtaaacacccagattgacctgattcgcaagaagatgaaagaagcgctggaaaaccaagcagaagcgaccaaagctattatcaactatcaatataaccagtacacagaggaagaaaagaataacatcaacttcaacatcgacgacttatcttcaaagctgaatgaatctattaacaaagcgatgattaatattaacaagttcttgaaccaatgtagtgtcagctatctgatgaactcgatgatcccttacggtgtgaaacgtctggaagacttcgatgcaagccttaaagatgcccttctgaagtatatttacgataatcgcggaactcttattggccaagtggatcgcttaaaagataaagtcaacaacacgctgagtacagacatcccttttcagctgtctaaatatgtggacaatcagcgcctgctgtccacgtttacggaatacatcaaaaacatcatcaacactagtattctgaacttgcgttacgagagtaaccatctgattgatctgagccgttacgcatctaaaatcaacatcggctcgaaggtgaacttcgatcctatcgacaaaaaccagattcaattgttcaacttagaatcgtcaaagattgaagttatcttaaaaaatgcgattgtatataattcaatgtacgaaaatttctctacgagcttttggattcgtattccgaaatatttcaacagtatctctttaaacaacgagtatactatcatcaattgtatggagaataacagcgggtggaaagtgagccttaactatggtgaaatcatctggactctgcaggacactcaagaaattaaacaacgcgtggtgtttaaatactcacagatgattaacatctcggattatattaatcgctggatttttgtgacaattactaacaaccggctgaacaacagcaaaatttacattaacggtcgcctgatcgatcagaaaccaatcagtaatctcggtaacattcacgcatcgaataatatcatgttcaaactggatggttgtcgcgacacgcaccgttacatttggatcaaatacttcaatttattcgacaaagaactcaacgaaaaggagattaaggatctttatgacaatcagtctaattcgggtattctgaaagacttttggggtgattaccttcagtacgataaaccgtattatatgttaaacttatatgatccgaataaatacgttgacgtcaacaacgttggcattcgtggctatatgtatctgaaagggccgcgtggcagcgtgatgaccactaacatttacttaaactcctccctctatcgcggtactaaatttattatcaagaaatatgcctctggcaacaaggacaatatcgtacgcaataacgatcgcgtctacattaacgtggtggtgaagaataaagaatatcgtctggcgaccaatgctagtcaggcgggcgtggagaaaattctgtctgcacttgaaatcccggatgtgggtaatttatcccaggtggttgtgatgaaaagtaaaaatgaccaagggatcaccaataaatgcaaaatgaatctgcaagataacaacggcaacgacattggttttatcggcttccaccaattcaataatatcgcgaaactggtggcctcaaattggtacaaccgtcagattgagcgcagctcccgcactttaggctgtagctgggagttcattccggtagatgacggttggggagaacgcccattgaaagtcgacaagcttgcggccgcactcgagcaccaccaccaccaccactga

SEQ ID NO: 113 - protein, 1312 aa, Artificial Sequence
  BoNT/A-KHis, E. coli-modified
MPFVNKQFNYKDPVNGVDIAYIKIPNAGQMQPVKAFKIHNKIWVIPERDTFTNPEEGDLNPPPEAKQVPVSYYDSTYLSTDNEKDNYLKGVTKLFERIYSTDLGRMLLTSIVRGIPFWGGSTIDTELKVIDTNCINVIQPDGSYRSEELNLVIIGPSADIIQFECKSFGHEVLNLTRNGYGSTQYIRFSPDFTFGFEESLEVDTNPLLGAGKFATDPAVTLAHELIHAGHRLYGIAINPNRVFKVNTNAYYEMSGLEVSFEELRTFGGHDAKFIDSLQENEFRLYYYNKFKDIASTLNKAKSIVGTTASLQYMKNVFKEKYLLSEDTSGKFSVDKLKFDKLYKMLTEIYTEDNFVKFFKVLNRKTYLNFDKAVFKINIVPKVNYTIYDGFNLRNTNLAANFNGQNTEINNMNFTKLKNFTGLFEFYKLLCVRGIITSKTKSLDKGYNKALNDLCIKVNNWDLFFSPSEDNFTNDLNKGEEITSDTNIEAAEENISLDLIQQYYLTFNFDNEPENISIENLSSDIIGQLELMPNIERFPNGKKYELDKYTMFHYLRAQEFEHGKSRIALTNSVNEALLNPSRVYTFFSSDYVKKVNKATEAAMFLGWVEQLVYDFTDETSEVSTTDKIADITIIIPYIGPALNIGNMLYKDDFVGALIFSGAVILLEFIPEIAIPVLGTFALVSYIANKVLTVQTIDNALSKRNEKWDEVYKYIVTNWLAKVNTQIDLIRKKMKEALENQAEATKAIINYQYNQYTEEEKNNINFNIDDLSSKLNESINKAMININKFLNQCSVSYLMNSMIPYGVKRLEDFDASLKDALLKYIYDNRGTLIGQVDRLKDKVNNTLSTDIPFQLSKYVDNQRLLSTFTEYIKNIINTSILNLRYESNHLIDLSRYASKINIGSKVNFDPIDKNQIQLFNLESSKIEVILKNAIVYNSMYENFSTSFWIRIPKYFNSISLNNEYTIINCMENNSGWKVSLNYGEIIWTLQDTQEIKQRVVFKYSQMINISDYINRWIFVTITNNRLNNSKIYINGRLIDQKPISNLGNIHASNNIMFKLDGCRDTHRYIWIKYFNLFDKELNEKEIKDLYDNQSNSGILKDFWGDYLQYDKPYYMLNLYDPNKYVDVNNVGIRGYMYLKGPRGSVMTTNIYLNSSLYRGTKFIIKKYASGNKDNIVRNNDRVYINVVVKNKEYRLATNASQAGVEKILSALEIPDVGNLSQVVVMKSKNDQGITNKCKMNLQDNNGNDIGFIGFHQFNNIAKLVASNWYNRQIERSSRTLGCSWEFIPVDDGWGERPLKVDKLAAALEHHHHHH

SEQ ID NO: 114 - DNA, 4005 bp, Artificial Sequence
  His-BoNT/A, unmodified
atgcggggttctcatcatcatcatcatcatggtatggctagcatgactggtggacagcaaatgggtcgggatctgtacgacgatgacgataaggatccgaattcgagctcccatatgccatttgttaataaacaatttaattataaagatcctgtaaatggtgttgatattgcttatataaaaattccaaatgcaggacaaatgcaaccagtaaaagcttttaaaattcataataaaatatgggttattccagaaagagatacatttacaaatcctgaagaaggagatttaaatccaccaccagaagcaaaacaagttccagtttcatattatgattcaacatatttaagtacagataatgaaaaagataattatttaaagggagttacaaaattatttgagagaatttattcaactgatcttggaagaatgttgttaacatcaatagtaaggggaataccattttggggtggaagtacaatagatacagaattaaaagttattgatactaattgtattaatgtgatacaaccagatggtagttatagatcagaagaacttaatctagtaataataggaccctcagctgatattatacagtttgaatgtaaaagctttggacatgaagttttgaatcttacgcgaaatggttatggctctactcaatacattagatttagcccagattttacatttggttttgaggagtcacttgaagttgatacaaatcctcttttaggtgcaggcaaatttgctacagatccagcagtaacattagcacatgaacttatacatgctggacatagattatatggaatagcaattaatccaaatagggtttttaaagtaaatactaatgcctattatgaaatgagtgggttagaagtaagctttgaggaacttagaacatttgggggacatgatgcaaagtttatagatagtttacaggaaaacgaatttcgtctatattattataataagtttaaagatatagcaagtacacttaataaagctaaatcaatagtaggtactactgcttcattacagtatatgaaaaatgtttttaaagagaaatatctcctatctgaagatacatctggaaaattttcggtagataaattaaaatttgataagttatacaaaatgttaacagagatttacacagaggataattttgttaagttttttaaagtacttaacagaaaaacatatttgaattttgataaagccgtatttaagataaatatagtacctaaggtaaattacacaatatatgatggatttaatttaagaaatacaaatttagcagcaaactttaatggtcaaaatacagaaattaataatatgaattttactaaactaaaaaattttactggattgtttgaattttataagttgctatgtgtaagagggataataacttctaaaactaaatcattagataaaggatacaataaggcattaaatgatttatgtatcaaagttaataattgggacttgttttttagtccttcagaagataattttactaatgatctaaataaaggagaagaaattacatctgatactaatatagaagcagcagaagaaaatattagtttagatttaatacaacaatattatttaacctttaattttgataatgaacctgaaaatatttcaatagaaaatctttcaagtgacattataggccaattagaacttatgcctaatatagaaagatttcctaatggaaaaaagtatgagttagataaatatactatgttccattatcttcgtgctcaagaatttgaacatggtaaatctaggattgctttaacaaattctgttaacgaagcattattaaatcctagtcgtgtttatacatttttttcttcagactatgtaaagaaagttaataaagctacggaggcagctatgtttttaggctgggtagaacaattagtatatgattttaccgatgaaactagcgaagtaagtactacggataaaattgcggatataactataattattccatatataggacctgctttaaatataggtaatatgttatataaagatgattttgtaggtgctttaatattttcaggagctgttattctgttagaatttataccagagattgcaatacctgtattaggtacttttgcacttgtatcatatattgcgaataaggttctaaccgttcaaacaatagataatgctttaagtaaaagaaatgaaaaatgggatgaggtctataaatatatagtaacaaattggttagcaaaggttaatacacagattgatctaataagaaaaaaaatgaaagaagctttagaaaatcaagcagaagcaacaaaggctataataaactatcagtataatcaatatactgaggaagagaaaaataatattaattttaatattgatgatttaagttcgaaacttaatgagtctataaataaagctatgattaatataaataaatttttgaatcaatgctctgtttcatatttaatgaattctatgatcccttatggtgttaaacggttagaagattttgatgctagtcttaaagatgcattattaaagtatatatatgataatagaggaactttaattggtcaagtagatagattaaaagataaagttaataatacacttagtacagatataccttttcagctttccaaatacgtagataatcaaagattattatctacatttactgaatatattaagaatattattaatacttctatattgaatttaagatatgaaagtaatcatttaatagacttatctaggtatgcatcaaaaataaatattggtagtaaagtaaattttgatccaatagataaaaatcaaattcaattatttaatttagaaagtagtaaaattgaggtaattttaaaaaatgctattgtatataatagtatgtatgaaaattttagtactagcttttggataagaattcctaagtattttaacagtataagtctaaataatgaatatacaataataaattgtatggaaaataattcaggatggaaagtatcacttaattatggtgaaataatctggactttacaggatactcaggaaataaaacaaagagtagtttttaaatacagtcaaatgattaatatatcagattatataaacagatggatttttgtaactatcactaataatagattaaataactctaaaatttatataaatggaagattaatagatcaaaaaccaatttcaaatttaggtaatattcatgctagtaataatataatgtttaaattagatggttgtagagatacacatagatatatttggataaaatattttaatctttttgataaggaattaaatgaaaaagaaatcaaagatttatatgataatcaatcaaattcaggtattttaaaagacttttggggtgattatttacaatatgataaaccatactatatgttaaatttatatgatccaaataaatatgtcgatgtaaataatgtaggtattagaggttatatgtatcttaaagggcctagaggtagcgtaatgactacaaacatttatttaaattcaagtttgtatagggggacaaaatttattataaaaaaatatgcttctggaaataaagataatattgttagaaataatgatcgtgtatatattaatgtagtagttaaaaataaagaatataggttagctactaatgcgtcacaggcaggcgtagaaaaaatactaagtgcattagaaatacctgatgtaggaaatctaagtcaagtagtagtaatgaagtcaaaaaatgatcaaggaataacaaataaatgcaaaatgaatttacaagataataatgggaatgatataggctttataggatttcatcagtttaataatatagctaaactagtagcaagtaattggtataatagacaaatagaaagatctagtaggactttgggttgctcatgggaatttattcctgtagatgatggatggggagaaaggccactgtaa

SEQ ID NO: 115 - DNA, 3939 bp, Artificial Sequence
  BoNT/A-KHis, unmodified
atgccatttgttaataaacaatttaattataaagatcctgtaaatggtgttgatattgcttatataaaaattccaaatgcaggacaaatgcaaccagtaaaagcttttaaaattcataataaaatatgggttattccagaaagagatacatttacaaatcctgaagaaggagatttaaatccaccaccagaagcaaaacaagttccagtttcatattatgattcaacatatttaagtacagataatgaaaaagataattatttaaagggagttacaaaattatttgagagaatttattcaactgatcttggaagaatgttgttaacatcaatagtaaggggaataccattttggggtggaagtacaatagatacagaattaaaagttattgatactaattgtattaatgtgatacaaccagatggtagttatagatcagaagaacttaatctagtaataataggaccctcagctgatattatacagtttgaatgtaaaagctttggacatgaagttttgaatcttacgcgaaatggttatggctctactcaatacattagatttagcccagattttacatttggttttgaggagtcacttgaagttgatacaaatcctcttttaggtgcaggcaaatttgctacagatccagcagtaacattagcacatgaacttatacatgctggacatagattatatggaatagcaattaatccaaatagggtttttaaagtaaatactaatgcctattatgaaatgagtgggttagaagtaagctttgaggaacttagaacatttgggggacatgatgcaaagtttatagatagtttacaggaaaacgaatttcgtctatattattataataagtttaaagatatagcaagtacacttaataaagctaaatcaatagtaggtactactgcttcattacagtatatgaaaaatgtttttaaagagaaatatctcctatctgaagatacatctggaaaattttcggtagataaattaaaatttgataagttatacaaaatgttaacagagatttacacagaggataattttgttaagttttttaaagtacttaacagaaaaacatatttgaattttgataaagccgtatttaagataaatatagtacctaaggtaaattacacaatatatgatggatttaatttaagaaatacaaatttagcagcaaactttaatggtcaaaatacagaaattaataatatgaattttactaaactaaaaaattttactggattgtttgaattttataagttgctatgtgtaagagggataataacttctaaaactaaatcattagataaaggatacaataaggcattaaatgatttatgtatcaaagttaataattgggacttgttttttagtccttcagaagataattttactaatgatctaaataaaggagaagaaattacatctgatactaatatagaagcagcagaagaaaatattagtttagatttaatacaacaatattatttaacctttaattttgataatgaacctgaaaatatttcaatagaaaatctttcaagtgacattataggccaattagaacttatgcctaatatagaaagatttcctaatggaaaaaagtatgagttagataaatatactatgttccattatcttcgtgctcaagaatttgaacatggtaaatctaggattgctttaacaaattctgttaacgaagcattattaaatcctagtcgtgtttatacatttttttcttcagactatgtaaagaaagttaataaagctacggaggcagctatgtttttaggctgggtagaacaattagtatatgattttaccgatgaaactagcgaagtaagtactacggataaaattgcggatataactataattattccatatataggacctgctttaaatataggtaatatgttatataaagatgattttgtaggtgctttaatattttcaggagctgttattctgttagaatttataccagagattgcaatacctgtattaggtacttttgcacttgtatcatatattgcgaataaggttctaaccgttcaaacaatagataatgctttaagtaaaagaaatgaaaaatgggatgaggtctataaatatatagtaacaaattggttagcaaaggttaatacacagattgatctaataagaaaaaaaatgaaagaagctttagaaaatcaagcagaagcaacaaaggctataataaactatcagtataatcaatatactgaggaagagaaaaataatattaattttaatattgatgatttaagttcgaaacttaatgagtctataaataaagctatgattaatataaataaatttttgaatcaatgctctgtttcatatttaatgaattctatgatcccttatggtgttaaacggttagaagattttgatgctagtcttaaagatgcattattaaagtatatatatgataatagaggaactttaattggtcaagtagatagattaaaagataaagttaataatacacttagtacagatataccttttcagctttccaaatacgtagataatcaaagattattatctacatttactgaatatattaagaatattattaatacttctatattgaatttaagatatgaaagtaatcatttaatagacttatctaggtatgcatcaaaaataaatattggtagtaaagtaaattttgatccaatagataaaaatcaaattcaattatttaatttagaaagtagtaaaattgaggtaattttaaaaaatgctattgtatataatagtatgtatgaaaattttagtactagcttttggataagaattcctaagtattttaacagtataagtctaaataatgaatatacaataataaattgtatggaaaataattcaggatggaaagtatcacttaattatggtgaaataatctggactttacaggatactcaggaaataaaacaaagagtagtttttaaatacagtcaaatgattaatatatcagattatataaacagatggatttttgtaactatcactaataatagattaaataactctaaaatttatataaatggaagattaatagatcaaaaaccaatttcaaatttaggtaatattcatgctagtaataatataatgtttaaattagatggttgtagagatacacatagatatatttggataaaatattttaatctttttgataaggaattaaatgaaaaagaaatcaaagatttatatgataatcaatcaaattcaggtattttaaaagacttttggggtgattatttacaatatgataaaccatactatatgttaaatttatatgatccaaataaatatgtcgatgtaaataatgtaggtattagaggttatatgtatcttaaagggcctagaggtagcgtaatgactacaaacatttatttaaattcaagtttgtatagggggacaaaatttattataaaaaaatatgcttctggaaataaagataatattgttagaaataatgatcgtgtatatattaatgtagtagttaaaaataaagaatataggttagctactaatgcgtcacaggcaggcgtagaaaaaatactaagtgcattagaaatacctgatgtaggaaatctaagtcaagtagtagtaatgaagtcaaaaaatgatcaaggaataacaaataaatgcaaaatgaatttacaagataataatgggaatgatataggctttataggatttcatcagtttaataatatagctaaactagtagcaagtaattggtataatagacaaatagaaagatctagtaggactttgggttgctcatgggaatttattcctgtagatgatggatggggagaaaggccactgaaagtcgacaagcttgcggccgcactcgagcaccaccaccaccaccactga

SEQ ID NO: 116 - DNA, 3891 bp, Artificial Sequence
  iBoNT/A (H227Y) , E-coli-modified
atgccgttcgtaaacaaacagttcaactataaagacccagtcaacggcgtggacattgcctatatcaaaatcccgaatgcgggtcaaatgcagcccgtgaaagcatttaaaatccataacaaaatttgggtgatcccggagcgcgatacgttcacgaacccggaagaaggagatttaaacccaccgcctgaggctaaacaggtcccggtgtcttactatgatagcacatacctgagtaccgacaatgaaaaggacaactacctgaaaggtgttaccaaactgttcgagcgcatttattcgacagatctcggtcgcatgttgctgacttctattgtgcgcggcattccgttttggggtggtagcaccatcgatacagaactcaaagtgattgacaccaactgcatcaatgtgattcagcctgatgggagctaccggtccgaagagcttaacctcgtaatcattggcccgagcgcggatattatccaattcgaatgtaaatcttttgggcatgaagtcctgaatctgacgcggaatggctatggatcgacgcagtatattcgtttttctccagatttcacatttggatttgaagaaagcctcgaagttgatacgaaccctcttttaggcgcgggaaaattcgcgacggacccagcggtgaccttggcacatgaacttatttatgccgggcatcgcttgtatggaatcgccattaacccgaaccgtgttttcaaggtgaatacgaacgcgtattacgagatgtcgggcttagaagtgtcctttgaagaactgcgcacgtttggcggtcatgatgcaaaatttattgatagtctgcaagaaaacgaatttcggctgtactattacaataaattcaaagacattgcatcaaccttaaacaaggcgaaaagcattgtgggtaccacggctagcttacaatatatgaaaaacgttttcaaagaaaaatacctccttagcgaagacacttccggcaaattctctgtcgataaactgaaatttgataaactgtataaaatgctcaccgagatctacacagaggataactttgtcaaattcttcaaggtcttgaatcggaaaacctatctgaacttcgataaagccgtctttaagatcaacatcgtaccgaaagttaactacaccatctatgatggctttaatctgcgcaatacgaatctggcggcgaactttaacggccagaacaccgaaatcaacaacatgaactttactaaactgaaaaattttaccggcttgtttgaattttataagctcctgtgtgtccgcggtattatcaccagcaaaaccaaatccttggataagggctataacaaggcgctcaatgatttatgcatcaaggtgaacaactgggacttgtttttctctccatctgaagataattttactaacgacttgaacaaaggagaggaaattacttccgataccaacatcgaagcagcggaagagaatattagcctggatcttattcaacaatattacctgacctttaattttgataacgagcctgagaacatttccattgagaatctcagctctgacatcatcggccagctggaactgatgccgaatatcgaacgctttcctaatggaaagaaatatgaattggacaaatacaccatgttccactatctccgcgcgcaggagtttgagcacggcaagtctcgtattgctctgaccaattcggtaaacgaagcccttttaaatccttcgcgtgtgtacacctttttctcaagcgattatgttaaaaaagtgaacaaggcgaccgaagcggcgatgtttttgggatgggtggaacaactggtatatgactttacggatgaaacttctgaagtctcgaccaccgacaaaattgccgatattaccattatcattccctatattggccctgcactgaacattggtaacatgctgtataaagatgattttgtgggcgccctgatcttttcaggcgctgttatcctgctggaatttatcccggaaatcgccattccagtactcggtacctttgcgctggtgtcctatatcgcaaacaaagttttgactgtccagacgatcgacaacgcgctcagtaaacgtaacgaaaaatgggatgaggtgtataagtatattgttaccaactggctcgctaaagtaaacacccagattgacctgattcgcaagaagatgaaagaagcgctggaaaaccaagcagaagcgaccaaagctattatcaactatcaatataaccagtacacagaggaagaaaagaataacatcaacttcaacatcgacgacttatcttcaaagctgaatgaatctattaacaaagcgatgattaatattaacaagttcttgaaccaatgtagtgtcagctatctgatgaactcgatgatcccatatggtgtgaaacgtctggaagacttcgatgcaagccttaaagatgcccttctgaagtatatttacgataatcgcggaactcttattggccaagtggatcgcttaaaagataaagtcaacaacacgctgagtacagacatcccttttcagctgtctaaatatgtggacaatcagcgcctgctgtccacgtttacggaatacatcaaaaacatcatcaacactagtattctgaacttgcgttacgagagtaaccatctgattgatctgagccgttacgcatctaaaatcaacatcggctcgaaggtgaacttcgatcctatcgacaaaaaccagattcaattgttcaacttagaatcgtcaaagattgaagttatcttaaaaaatgcgattgtatataattcaatgtacgaaaatttctctacgagcttttggattcgtattccgaaatatttcaacagtatctctttaaacaacgagtatactatcatcaattgtatggagaataacagcgggtggaaagtgagccttaactatggtgaaatcatctggactctgcaggacactcaagaaattaaacaacgcgtggtgtttaaatactcacagatgattaacatctcggattatattaatcgctggatttttgtgacaattactaacaaccggctgaacaacagcaaaatttacattaacggtcgcctgatcgatcagaaaccaatcagtaatctcggtaacattcacgcatcgaataatatcatgttcaaactggatggttgtcgcgacacgcaccgttacatttggatcaaatacttcaatttattcgacaaagaactcaacgaaaaggagattaaggatctttatgacaatcagtctaattcgggtattctgaaagacttttggggtgattaccttcagtacgataaaccgtattatatgttaaacttatatgatccgaataaatacgttgacgtcaacaacgttggcattcgtggctatatgtatctgaaagggccgcgtggcagcgtgatgaccactaacatttacttaaactcctccctctatcgcggtactaaatttattatcaagaaatatgcctctggcaacaaggacaatatcgtacgcaataacgatcgcgtctacattaacgtggtggtgaagaataaagaatatcgtctggcgaccaatgctagtcaggcgggcgtggagaaaattctgtctgcacttgaaatcccggatgtgggtaatttatcccaggtggttgtgatgaaaagtaaaaatgaccaagggatcaccaataaatgcaaaatgaatctgcaagataacaacggcaacgacattggttttatcggcttccaccaattcaataatatcgcgaaactggtggcctcaaattggtacaaccgtcagattgagcgcagctcccgcactttaggctgtagctgggagttcattccggtagatgacggttggggagaacgcccattgtaa

SEQ ID NO: 117 - protein, 1296 aa, Artificial Sequence
  iBoNT/A (H227Y)  , E-coli-modified
MPFVNKQFNYKDPVNGVDIAYIKIPNAGQMQPVKAFKIHNKIWVIPERDTFTNPEEGDLNPPPEAKQVPVSYYDSTYLSTDNEKDNYLKGVTKLFERIYSTDLGRMLLTSIVRGIPFWGGSTIDTELKVIDTNCINVIQPDGSYRSEELNLVIIGPSADIIQFECKSFGHEVLNLTRNGYGSTQYIRFSPDFTFGFEESLEVDTNPLLGAGKFATDPAVTLAHELIYAGHRLYGIAINPNRVFKVNTNAYYEMSGLEVSFEELRTFGGHDAKFIDSLQENEFRLYYYNKFKDIASTLNKAKSIVGTTASLQYMKNVFKEKYLLSEDTSGKFSVDKLKFDKLYKMLTEIYTEDNFVKFFKVLNRKTYLNFDKAVFKINIVPKVNYTIYDGFNLRNTNLAANFNGQNTEINNMNFTKLKNFTGLFEFYKLLCVRGIITSKTKSLDKGYNKALNDLCIKVNNWDLFFSPSEDNFTNDLNKGEEITSDTNIEAAEENISLDLIQQYYLTFNFDNEPENISIENLSSDIIGQLELMPNIERFPNGKKYELDKYTMFHYLRAQEFEHGKSRIALTNSVNEALLNPSRVYTFFSSDYVKKVNKATEAAMFLGWVEQLVYDFTDETSEVSTTDKIADITIIIPYIGPALNIGNMLYKDDFVGALIFSGAVILLEFIPEIAIPVLGTFALVSYIANKVLTVQTIDNALSKRNEKWDEVYKYIVTNWLAKVNTQIDLIRKKMKEALENQAEATKAIINYQYNQYTEEEKNNINFNIDDLSSKLNESINKAMININKFLNQCSVSYLMNSMIPYGVKRLEDFDASLKDALLKYIYDNRGTLIGQVDRLKDKVNNTLSTDIPFQLSKYVDNQRLLSTFTEYIKNIINTSILNLRYESNHLIDLSRYASKINIGSKVNFDPIDKNQIQLFNLESSKIEVILKNAIVYNSMYENFSTSFWIRIPKYFNSISLNNEYTIINCMENNSGWKVSLNYGEIIWTLQDTQEIKQRVVFKYSQMINISDYINRWIFVTITNNRLNNSKIYINGRLIDQKPISNLGNIHASNNIMFKLDGCRDTHRYIWIKYFNLFDKELNEKEIKDLYDNQSNSGILKDFWGDYLQYDKPYYMLNLYDPNKYVDVNNVGIRGYMYLKGPRGSVMTTNIYLNSSLYRGTKFIIKKYASGNKDNIVRNNDRVYINVVVKNKEYRLATNASQAGVEKILSALEIPDVGNLSQVVVMKSKNDQGITNKCKMNLQDNNGNDIGFIGFHQFNNIAKLVASNWYNRQIERSSRTLGCSWEFIPVDDGWGERPL

SEQ ID NO: 118 - DNA, 4005 bp, Artificial Sequence
  His-iBoNT/A (H265Y), E. coli-modified
atgcggggttctcatcatcatcatcatcatggtatggctagcatgactggtggacagcaaatgggtcgggatctgtacgacgatgacgataaggatccgaattcgagctcccatatgccgttcgtaaacaaacagttcaactataaagacccagtcaacggcgtggacattgcctatatcaaaatcccgaatgcgggtcaaatgcagcccgtgaaagcatttaaaatccataacaaaatttgggtgatcccggagcgcgatacgttcacgaacccggaagaaggagatttaaacccaccgcctgaggctaaacaggtcccggtgtcttactatgatagcacatacctgagtaccgacaatgaaaaggacaactacctgaaaggtgttaccaaactgttcgagcgcatttattcgacagatctcggtcgcatgttgctgacttctattgtgcgcggcattccgttttggggtggtagcaccatcgatacagaactcaaagtgattgacaccaactgcatcaatgtgattcagcctgatgggagctaccggtccgaagagcttaacctcgtaatcattggcccgagcgcggatattatccaattcgaatgtaaatcttttgggcatgaagtcctgaatctgacgcggaatggctatggatcgacgcagtatattcgtttttctccagatttcacatttggatttgaagaaagcctcgaagttgatacgaaccctcttttaggcgcgggaaaattcgcgacggacccagcggtgaccttggcacatgaacttatttatgccgggcatcgcttgtatggaatcgccattaacccgaaccgtgttttcaaggtgaatacgaacgcgtattacgagatgtcgggcttagaagtgtcctttgaagaactgcgcacgtttggcggtcatgatgcaaaatttattgatagtctgcaagaaaacgaatttcggctgtactattacaataaattcaaagacattgcatcaaccttaaacaaggcgaaaagcattgtgggtaccacggctagcttacaatatatgaaaaacgttttcaaagaaaaatacctccttagcgaagacacttccggcaaattctctgtcgataaactgaaatttgataaactgtataaaatgctcaccgagatctacacagaggataactttgtcaaattcttcaaggtcttgaatcggaaaacctatctgaacttcgataaagccgtctttaagatcaacatcgtaccgaaagttaactacaccatctatgatggctttaatctgcgcaatacgaatctggcggcgaactttaacggccagaacaccgaaatcaacaacatgaactttactaaactgaaaaattttaccggcttgtttgaattttataagctcctgtgtgtccgcggtattatcaccagcaaaaccaaatccttggataagggctataacaaggcgctcaatgatttatgcatcaaggtgaacaactgggacttgtttttctctccatctgaagataattttactaacgacttgaacaaaggagaggaaattacttccgataccaacatcgaagcagcggaagagaatattagcctggatcttattcaacaatattacctgacctttaattttgataacgagcctgagaacatttccattgagaatctcagctctgacatcatcggccagctggaactgatgccgaatatcgaacgctttcctaatggaaagaaatatgaattggacaaatacaccatgttccactatctccgcgcgcaggagtttgagcacggcaagtctcgtattgctctgaccaattcggtaaacgaagcccttttaaatccttcgcgtgtgtacacctttttctcaagcgattatgttaaaaaagtgaacaaggcgaccgaagcggcgatgtttttgggatgggtggaacaactggtatatgactttacggatgaaacttctgaagtctcgaccaccgacaaaattgccgatattaccattatcattccctatattggccctgcactgaacattggtaacatgctgtataaagatgattttgtgggcgccctgatcttttcaggcgctgttatcctgctggaatttatcccggaaatcgccattccagtactcggtacctttgcgctggtgtcctatatcgcaaacaaagttttgactgtccagacgatcgacaacgcgctcagtaaacgtaacgaaaaatgggatgaggtgtataagtatattgttaccaactggctcgctaaagtaaacacccagattgacctgattcgcaagaagatgaaagaagcgctggaaaaccaagcagaagcgaccaaagctattatcaactatcaatataaccagtacacagaggaagaaaagaataacatcaacttcaacatcgacgacttatcttcaaagctgaatgaatctattaacaaagcgatgattaatattaacaagttcttgaaccaatgtagtgtcagctatctgatgaactcgatgatcccatatggtgtgaaacgtctggaagacttcgatgcaagccttaaagatgcccttctgaagtatatttacgataatcgcggaactcttattggccaagtggatcgcttaaaagataaagtcaacaacacgctgagtacagacatcccttttcagctgtctaaatatgtggacaatcagcgcctgctgtccacgtttacggaatacatcaaaaacatcatcaacactagtattctgaacttgcgttacgagagtaaccatctgattgatctgagccgttacgcatctaaaatcaacatcggctcgaaggtgaacttcgatcctatcgacaaaaaccagattcaattgttcaacttagaatcgtcaaagattgaagttatcttaaaaaatgcgattgtatataattcaatgtacgaaaatttctctacgagcttttggattcgtattccgaaatatttcaacagtatctctttaaacaacgagtatactatcatcaattgtatggagaataacagcgggtggaaagtgagccttaactatggtgaaatcatctggactctgcaggacactcaagaaattaaacaacgcgtggtgtttaaatactcacagatgattaacatctcggattatattaatcgctggatttttgtgacaattactaacaaccggctgaacaacagcaaaatttacattaacggtcgcctgatcgatcagaaaccaatcagtaatctcggtaacattcacgcatcgaataatatcatgttcaaactggatggttgtcgcgacacgcaccgttacatttggatcaaatacttcaatttattcgacaaagaactcaacgaaaaggagattaaggatctttatgacaatcagtctaattcgggtattctgaaagacttttggggtgattaccttcagtacgataaaccgtattatatgttaaacttatatgatccgaataaatacgttgacgtcaacaacgttggcattcgtggctatatgtatctgaaagggccgcgtggcagcgtgatgaccactaacatttacttaaactcctccctctatcgcggtactaaatttattatcaagaaatatgcctctggcaacaaggacaatatcgtacgcaataacgatcgcgtctacattaacgtggtggtgaagaataaagaatatcgtctggcgaccaatgctagtcaggcgggcgtggagaaaattctgtctgcacttgaaatcccggatgtgggtaatttatcccaggtggttgtgatgaaaagtaaaaatgaccaagggatcaccaataaatgcaaaatgaatctgcaagataacaacggcaacgacattggttttatcggcttccaccaattcaataatatcgcgaaactggtggcctcaaattggtacaaccgtcagattgagcgcagctcccgcactttaggctgtagctgggagttcattccggtagatgacggttggggagaacgcccattgtaa

SEQ ID NO: 119 - protein, 1334 aa, Artificial Sequence
  His-iBoNT/A (H265Y), E. coli-modified
MRGSHHHHHHGMASMTGGQQMGRDLYDDDDKDPNSSSHMPFVNKQFNYKDPVNGVDIAYIKIPNAGQMQPVKAFKIHNKIWVIPERDTFTNPEEGDLNPPPEAKQVPVSYYDSTYLSTDNEKDNYLKGVTKLFERIYSTDLGRMLLTSIVRGIPFWGGSTIDTELKVIDTNCINVIQPDGSYRSEELNLVIIGPSADIIQFECKSFGHEVLNLTRNGYGSTQYIRFSPDFTFGFEESLEVDTNPLLGAGKFATDPAVTLAHELIYAGHRLYGIAINPNRVFKVNTNAYYEMSGLEVSFEELRTFGGHDAKFIDSLQENEFRLYYYNKFKDIASTLNKAKSIVGTTASLQYMKNVFKEKYLLSEDTSGKFSVDKLKFDKLYKMLTEIYTEDNFVKFFKVLNRKTYLNFDKAVFKINIVPKVNYTIYDGFNLRNTNLAANFNGQNTEINNMNFTKLKNFTGLFEFYKLLCVRGIITSKTKSLDKGYNKALNDLCIKVNNWDLFFSPSEDNFTNDLNKGEEITSDTNIEAAEENISLDLIQQYYLTFNFDNEPENISIENLSSDIIGQLELMPNIERFPNGKKYELDKYTMFHYLRAQEFEHGKSRIALTNSVNEALLNPSRVYTFFSSDYVKKVNKATEAAMFLGWVEQLVYDFTDETSEVSTTDKIADITIIIPYIGPALNIGNMLYKDDFVGALIFSGAVILLEFIPEIAIPVLGTFALVSYIANKVLTVQTIDNALSKRNEKWDEVYKYIVTNWLAKVNTQIDLIRKKMKEALENQAEATKAIINYQYNQYTEEEKNNINFNIDDLSSKLNESINKAMININKFLNQCSVSYLMNSMIPYGVKRLEDFDASLKDALLKYIYDNRGTLIGQVDRLKDKVNNTLSTDIPFQLSKYVDNQRLLSTFTEYIKNIINTSILNLRYESNHLIDLSRYASKINIGSKVNFDPIDKNQIQLFNLESSKIEVILKNAIVYNSMYENFSTSFWIRIPKYFNSISLNNEYTIINCMENNSGWKVSLNYGEIIWTLQDTQEIKQRVVFKYSQMINISDYINRWIFVTITNNRLNNSKIYINGRLIDQKPISNLGNIHASNNIMFKLDGCRDTHRYIWIKYFNLFDKELNEKEIKDLYDNQSNSGILKDFWGDYLQYDKPYYMLNLYDPNKYVDVNNVGIRGYMYLKGPRGSVMTTNIYLNSSLYRGTKFIIKKYASGNKDNIVRNNDRVYINVVVKNKEYRLATNASQAGVEKILSALEIPDVGNLSQVVVMKSKNDQGITNKCKMNLQDNNGNDIGFIGFHQFNNIAKLVASNWYNRQIERSSRTLGCSWEFIPVDDGWGERPL

SEQ ID NO: 120 - DNA, 3939 bp, Artificial Sequence
  iBoNT/A-KHis (H227Y), E. coli-modified
atgccgttcgtaaacaaacagttcaactataaagacccagtcaacggcgtggacattgcctatatcaaaatcccgaatgcgggtcaaatgcagcccgtgaaagcatttaaaatccataacaaaatttgggtgatcccggagcgcgatacgttcacgaacccggaagaaggagatttaaacccaccgcctgaggctaaacaggtcccggtgtcttactatgatagcacatacctgagtaccgacaatgaaaaggacaactacctgaaaggtgttaccaaactgttcgagcgcatttattcgacagatctcggtcgcatgttgctgacttctattgtgcgcggcattccgttttggggtggtagcaccatcgatacagaactcaaagtgattgacaccaactgcatcaatgtgattcagcctgatgggagctaccggtccgaagagcttaacctcgtaatcattggcccgagcgcggatattatccaattcgaatgtaaatcttttgggcatgaagtcctgaatctgacgcggaatggctatggatcgacgcagtatattcgtttttctccagatttcacatttggatttgaagaaagcctcgaagttgatacgaaccctcttttaggcgcgggaaaattcgcgacggacccagcggtgaccttggcacatgaacttatttatgccgggcatcgcttgtatggaatcgccattaacccgaaccgtgttttcaaggtgaatacgaacgcgtattacgagatgtcgggcttagaagtgtcctttgaagaactgcgcacgtttggcggtcatgatgcaaaatttattgatagtctgcaagaaaacgaatttcggctgtactattacaataaattcaaagacattgcatcaaccttaaacaaggcgaaaagcattgtgggtaccacggctagcttacaatatatgaaaaacgttttcaaagaaaaatacctccttagcgaagacacttccggcaaattctctgtcgataaactgaaatttgataaactgtataaaatgctcaccgagatctacacagaggataactttgtcaaattcttcaaggtcttgaatcggaaaacctatctgaacttcgataaagccgtctttaagatcaacatcgtaccgaaagttaactacaccatctatgatggctttaatctgcgcaatacgaatctggcggcgaactttaacggccagaacaccgaaatcaacaacatgaactttactaaactgaaaaattttaccggcttgtttgaattttataagctcctgtgtgtccgcggtattatcaccagcaaaaccaaatccttggataagggctataacaaggcgctcaatgatttatgcatcaaggtgaacaactgggacttgtttttctctccatctgaagataattttactaacgacttgaacaaaggagaggaaattacttccgataccaacatcgaagcagcggaagagaatattagcctggatcttattcaacaatattacctgacctttaattttgataacgagcctgagaacatttccattgagaatctcagctctgacatcatcggccagctggaactgatgccgaatatcgaacgctttcctaatggaaagaaatatgaattggacaaatacaccatgttccactatctccgcgcgcaggagtttgagcacggcaagtctcgtattgctctgaccaattcggtaaacgaagcccttttaaatccttcgcgtgtgtacacctttttctcaagcgattatgttaaaaaagtgaacaaggcgaccgaagcggcgatgtttttgggatgggtggaacaactggtatatgactttacggatgaaacttctgaagtctcgaccaccgacaaaattgccgatattaccattatcattccctatattggccctgcactgaacattggtaacatgctgtataaagatgattttgtgggcgccctgatcttttcaggcgctgttatcctgctggaatttatcccggaaatcgccattccagtactcggtacctttgcgctggtgtcctatatcgcaaacaaagttttgactgtccagacgatcgacaacgcgctcagtaaacgtaacgaaaaatgggatgaggtgtataagtatattgttaccaactggctcgctaaagtaaacacccagattgacctgattcgcaagaagatgaaagaagcgctggaaaaccaagcagaagcgaccaaagctattatcaactatcaatataaccagtacacagaggaagaaaagaataacatcaacttcaacatcgacgacttatcttcaaagctgaatgaatctattaacaaagcgatgattaatattaacaagttcttgaaccaatgtagtgtcagctatctgatgaactcgatgatcccttacggtgtgaaacgtctggaagacttcgatgcaagccttaaagatgcccttctgaagtatatttacgataatcgcggaactcttattggccaagtggatcgcttaaaagataaagtcaacaacacgctgagtacagacatcccttttcagctgtctaaatatgtggacaatcagcgcctgctgtccacgtttacggaatacatcaaaaacatcatcaacactagtattctgaacttgcgttacgagagtaaccatctgattgatctgagccgttacgcatctaaaatcaacatcggctcgaaggtgaacttcgatcctatcgacaaaaaccagattcaattgttcaacttagaatcgtcaaagattgaagttatcttaaaaaatgcgattgtatataattcaatgtacgaaaatttctctacgagcttttggattcgtattccgaaatatttcaacagtatctctttaaacaacgagtatactatcatcaattgtatggagaataacagcgggtggaaagtgagccttaactatggtgaaatcatctggactctgcaggacactcaagaaattaaacaacgcgtggtgtttaaatactcacagatgattaacatctcggattatattaatcgctggatttttgtgacaattactaacaaccggctgaacaacagcaaaatttacattaacggtcgcctgatcgatcagaaaccaatcagtaatctcggtaacattcacgcatcgaataatatcatgttcaaactggatggttgtcgcgacacgcaccgttacatttggatcaaatacttcaatttattcgacaaagaactcaacgaaaaggagattaaggatctttatgacaatcagtctaattcgggtattctgaaagacttttggggtgattaccttcagtacgataaaccgtattatatgttaaacttatatgatccgaataaatacgttgacgtcaacaacgttggcattcgtggctatatgtatctgaaagggccgcgtggcagcgtgatgaccactaacatttacttaaactcctccctctatcgcggtactaaatttattatcaagaaatatgcctctggcaacaaggacaatatcgtacgcaataacgatcgcgtctacattaacgtggtggtgaagaataaagaatatcgtctggcgaccaatgctagtcaggcgggcgtggagaaaattctgtctgcacttgaaatcccggatgtgggtaatttatcccaggtggttgtgatgaaaagtaaaaatgaccaagggatcaccaataaatgcaaaatgaatctgcaagataacaacggcaacgacattggttttatcggcttccaccaattcaataatatcgcgaaactggtggcctcaaattggtacaaccgtcagattgagcgcagctcccgcactttaggctgtagctgggagttcattccggtagatgacggttggggagaacgcccattgaaagtcgacaagcttgcggccgcactcgagcaccaccaccaccaccactga

SEQ ID NO: 121 - protein, 1312 aa, Artificial Sequence
  iBoNT/A-KHis (H227Y), E. coli-modified
MPFVNKQFNYKDPVNGVDIAYIKIPNAGQMQPVKAFKIHNKIWVIPERDTFTNPEEGDLNPPPEAKQVPVSYYDSTYLSTDNEKDNYLKGVTKLFERIYSTDLGRMLLTSIVRGIPFWGGSTIDTELKVIDTNCINVIQPDGSYRSEELNLVIIGPSADIIQFECKSFGHEVLNLTRNGYGSTQYIRFSPDFTFGFEESLEVDTNPLLGAGKFATDPAVTLAHELIYAGHRLYGIAINPNRVFKVNTNAYYEMSGLEVSFEELRTFGGHDAKFIDSLQENEFRLYYYNKFKDIASTLNKAKSIVGTTASLQYMKNVFKEKYLLSEDTSGKFSVDKLKFDKLYKMLTEIYTEDNFVKFFKVLNRKTYLNFDKAVFKINIVPKVNYTIYDGFNLRNTNLAANFNGQNTEINNMNFTKLKNFTGLFEFYKLLCVRGIITSKTKSLDKGYNKALNDLCIKVNNWDLFFSPSEDNFTNDLNKGEEITSDTNIEAAEENISLDLIQQYYLTFNFDNEPENISIENLSSDIIGQLELMPNIERFPNGKKYELDKYTMFHYLRAQEFEHGKSRIALTNSVNEALLNPSRVYTFFSSDYVKKVNKATEAAMFLGWVEQLVYDFTDETSEVSTTDKIADITIIIPYIGPALNIGNMLYKDDFVGALIFSGAVILLEFIPEIAIPVLGTFALVSYIANKVLTVQTIDNALSKRNEKWDEVYKYIVTNWLAKVNTQIDLIRKKMKEALENQAEATKAIINYQYNQYTEEEKNNINFNIDDLSSKLNESINKAMININKFLNQCSVSYLMNSMIPYGVKRLEDFDASLKDALLKYIYDNRGTLIGQVDRLKDKVNNTLSTDIPFQLSKYVDNQRLLSTFTEYIKNIINTSILNLRYESNHLIDLSRYASKINIGSKVNFDPIDKNQIQLFNLESSKIEVILKNAIVYNSMYENFSTSFWIRIPKYFNSISLNNEYTIINCMENNSGWKVSLNYGEIIWTLQDTQEIKQRVVFKYSQMINISDYINRWIFVTITNNRLNNSKIYINGRLIDQKPISNLGNIHASNNIMFKLDGCRDTHRYIWIKYFNLFDKELNEKEIKDLYDNQSNSGILKDFWGDYLQYDKPYYMLNLYDPNKYVDVNNVGIRGYMYLKGPRGSVMTTNIYLNSSLYRGTKFIIKKYASGNKDNIVRNNDRVYINVVVKNKEYRLATNASQAGVEKILSALEIPDVGNLSQVVVMKSKNDQGITNKCKMNLQDNNGNDIGFIGFHQFNNIAKLVASNWYNRQIERSSRTLGCSWEFIPVDDGWGERPLKVDKLAAALEHHHHHH

SEQ ID NO: 122 - DNA, 3891 bp, Artificial Sequence
  BoNT/A, E. coli-modified 1-3
atgccgttcgttaacaaacagttcaactacaaggatccggttaacggcgttgacatcgcttacatcaaaatcccgaacgctggccagatgcagccggttaaagcattcaagattcacaacaaaatctgggtaatcccggaacgtgacaccttcaccaacccggaagaaggcgacctgaacccgccgccggaagctaaacaggttccggtttcctactacgactccacctacctgtccaccgacaacgagaaggacaactacctgaaaggcgttaccaaactgttcgaacgtatctactccaccgacctgggccgtatgctgctgacctccatcgttcgtggcatcccgttctggggcggctccaccatcgacaccgaactgaaagttatcgacaccaactgcatcaacgttatccagccggacggctcctaccgttccgaagaactgaacctggttatcatcggcccgtccgctgacatcatccagttcgaatgcaaatccttcggccacgaagttctgaacctgacccgtaacggctacggctccacccagtacatccgtttctccccggacttcaccttcggcttcgaagaatccctggaagttgacaccaacccgctgctgggcgctggcaaattcgctaccgacccggctgttaccctggctcacgaactgatccacgctggccaccgtctgtacggcatcgctatcaacccgaaccgtgtatttaaagttaacaccaacgcttactacgaaatgtccggcctggaagtttccttcgaagaactgcgtaccttcggcggccacgacgctaaattcatcgactccctgcaagagaacgaatttcgtctgtactattacaacaaattcaaagacatcgcttccaccctgaacaaagctaaatccatcgttggcaccaccgcttccctgcaatacatgaagaacgttttcaaagagaagtacctgctgtccgaagacacctccggcaaattctccgttgacaaactgaaattcgacaaactgtacaaaatgctgaccgaaatctacaccgaagacaacttcgttaaattcttcaaagttctgaaccgtaagacttacctgaacttcgacaaagctgttttcaagattaacatcgttccgaaagttaactacaccatctacgacggcttcaacctgcgtaacaccaacctggctgctaacttcaacggccagaacaccgaaatcaacaacatgaacttcaccaaactgaagaacttcaccggtctgttcgaattttacaaactgctgtgcgttcgtggcatcatcacctccaagactaaatccctggacaaaggctacaacaaagctctgaacgacctgtgcatcaaagttaacaactgggacctgttcttctccccgtccgaagacaacttcaccaacgacctgaacaaaggcgaagaaatcacctccgacaccaacatcgaagctgctgaagagaacatctccctggacctgatccagcagtactacctgaccttcaacttcgacaacgaaccggagaacatctccatcgaaaacctgtcctccgacatcatcggccagctggaactgatgccgaacatcgaacgtttcccgaacggcaagaagtatgaactggacaaatacaccatgttccactacctgcgtgctcaggaattcgaacacggcaaatcccgtatcgctctgaccaactccgttaacgaagctctgctgaacccgtcccgtgtttacaccttcttctcctccgactacgttaagaaggttaacaaagctaccgaagctgctatgttcctgggctgggttgaacagctggtttacgacttcaccgacgaaacctccgaagtttccaccaccgacaagattgctgacatcaccatcattatcccgtacatcggcccggctctgaacatcggcaacatgctgtataaagacgacttcgttggcgctctgatcttctccggcgctgttatcctgctggaatttatcccggaaatcgctatcccggttctgggcaccttcgctctggtttcctacatcgctaacaaagttctgaccgttcagaccatcgacaacgctctgtccaaacgtaacgagaagtgggacgaagtttacaaatacatcgttaccaactggctggctaaagttaacacccagatcgacctgatccgtaagaagatgaaagaagctctggaaaaccaggctgaagctaccaaagctatcatcaactaccagtacaaccagtacaccgaagaggaaaagaacaacatcaacttcaacatcgacgacctgagctccaaactgaacgaatccatcaacaaagctatgatcaacatcaacaaattcctgaaccagtgctccgtttcctacctgatgaactccatgatcccgtacggcgttaaacgtctggaagacttcgacgcttccctgaaagacgctctgctgaaatacatctacgacaaccgcggcaccctgatcggccaggttgaccgtctgaaagacaaagttaacaacaccctgtccaccgacatcccgttccagctgtccaaatacgtagacaaccagcgtctgctgtccaccttcaccgaatacatcaagaacatcatcaacacctccatcctgaacctgcgttacgaatccaaccacctgatcgacctgtcccgttacgctagcaaaatcaacatcggctccaaagttaacttcgacccgatcgacaagaaccagatccagctgttcaacctggaatcctccaagattgaagttatcctgaagaacgcaattgtttacaactccatgtacgagaacttctccacctccttctggattcgtatcccgaaatacttcaactccatctccctgaacaacgaatacaccatcatcaactgcatggagaacaactccggctggaaagtttccctgaactacggcgaaatcatctggaccctgcaagacacccaggaaatcaaacagcgtgttgttttcaaatactcccagatgatcaacatctccgactacatcaaccgttggatcttcgttaccatcaccaacaaccgtctgaacaactccaaaatctacatcaacggccgtctgatcgaccagaaaccgatctccaacctgggcaacatccacgcttccaacaacatcatgttcaaactggacggctgccgtgacacccaccgttacatctggatcaaatacttcaacctgttcgacaaagaactgaacgagaaggaaatcaaagacctgtacgacaaccagtccaactccggcatcctgaaagacttctggggcgactacctgcagtatgacaaaccgtactacatgctgaacctgtacgacccgaacaaatacgttgacgttaacaacgttggcatccgtggctacatgtacctgaaaggcccgcgtggctccgttatgaccaccaacatctacctgaactcctccctgtaccgtggcaccaaattcatcatcaagaagtacgcttccggcaacaaagacaacatcgttcgtaacaacgaccgtgtttacatcaacgttgtagttaagaacaaagaataccgtctggctaccaacgcttcccaggctggcgttgagaagattctgtccgctctggaaatcccggacgttggcaacctgagccaggttgtagttatgaaatccaagaacgaccagggcatcaccaacaaatgcaaaatgaacctgcaagacaacaacggcaacgacatcggcttcatcggcttccaccagttcaacaacatcgctaaactggttgcttccaactggtacaaccgtcagatcgaacgttcctcccgtaccctgggctgctcctgggaatttatcccggttgacgacggctggggcgaacgtccgctgtaa

SEQ ID NO: 123 - DNA, 3891 bp, Artificial Sequence
  BoNT/A, E. coli-modified 2-3
atgccgttcgttaacaaacagttcaactacaaagacccggttaacggcgttgacatcgcttacatcaaaatcccgaacgctggccagatgcagccggttaaagcattcaagattcacaacaaaatctgggtaatcccggaacgtgacaccttcaccaacccggaagaaggcgacctgaacccgccgccggaagctaaacaggttccggtttcctactacgactccacctacctgtccaccgacaacgagaaggacaactacctgaaaggcgttaccaaactgttcgaacgtatctactccaccgacctgggccgtatgctgctgactagcatcgttcgtggcatcccgttctggggcggctccaccatcgacaccgaactgaaagttatcgacaccaactgcatcaacgttatccagccggacggctcctaccgttccgaagaactgaacctggttatcatcggcccgtccgctgacatcatccagttcgaatgcaaatccttcggccacgaagttctgaacctgacccgtaacggctacggctccacccagtacatccgtttctccccggacttcaccttcggcttcgaagaatccctggaagttgacaccaacccgctgctgggcgctggcaaattcgctaccgacccggctgttaccctggctcacgaactgatccacgctggccaccgtctgtacggcatcgctatcaacccgaaccgtgtattcaaagttaacaccaacgcttactacgaaatgtccggcctggaagtttccttcgaagaactgcgtaccttcggcggccacgacgctaaattcatcgactccctgcaagaaaacgaattccgtctgtactattacaacaaattcaaagacatcgcttccaccctgaacaaagctaaatccatcgttggcaccaccgcttccctgcagtacatgaagaacgttttcaaagagaagtacctgctgtccgaagacacctccggcaaattctccgttgacaaactgaaattcgacaaactgtacaagatgctgaccgaaatctacaccgaagacaacttcgttaaattcttcaaagttctgaaccgtaaaacctacctgaacttcgacaaagctgttttcaagattaacatcgttccgaaagttaactacaccatctacgacggcttcaacctgcgtaacaccaacctggctgctaacttcaacggccagaacaccgaaatcaacaacatgaacttcaccaaactgaagaacttcaccggtctgttcgaattctacaaactgctgtgcgttcgtggcatcatcacctccaaaaccaaatccctggacaaaggctacaacaaagctctgaacgacctgtgcatcaaagttaacaactgggacctgttcttctctccgtccgaagacaacttcaccaacgacctgaacaaaggcgaagaaatcacctccgacaccaacatcgaagctgctgaagagaacatctccctggacctgatccagcagtactacctgaccttcaacttcgacaacgaaccggaaaacatctccatcgagaacctgtcctccgacatcatcggccagctggaactgatgccgaacatcgaacgtttcccgaacggcaagaagtatgaactggacaaatacaccatgttccactacctgcgtgctcaggaattcgaacacggcaaatcccgtatcgctctgaccaactccgttaacgaagctctgctgaacccgtcccgtgtttacaccttcttctcctccgactacgttaagaaggttaacaaagctaccgaagctgctatgttcctgggctgggttgaacagctggtttacgacttcaccgacgaaacctccgaagtttccaccaccgacaaaatcgctgacatcaccatcattatcccgtacatcggtccggctctgaacatcggcaacatgctgtataaagacgacttcgttggcgctctgatcttctccggcgctgttatcctgctggaattcatcccggaaatcgctatcccggttctgggcaccttcgctctggtttcctacatcgctaacaaagttctgaccgttcagaccatcgacaacgctctgtccaaacgtaacgagaagtgggacgaagtttacaaatacatcgttaccaactggctggctaaagttaacacccagatcgacctgatccgtaagaagatgaaagaagctctggagaaccaggctgaagctaccaaagctatcatcaactaccagtacaaccagtacaccgaagaagagaagaacaacatcaacttcaacatcgacgacctgtcctccaaactgaacgaatccatcaacaaagctatgatcaacatcaacaaattcctgaaccagtgctccgtttcctacctgatgaactccatgatcccgtacggcgttaaacgtctggaagacttcgacgcttccctgaaagacgctctgctgaaatacatctacgacaaccgcggcaccctgatcggccaggttgaccgtctgaaagacaaagttaacaacaccctgtccaccgacatcccgttccagctgtccaaatacgtagacaaccagcgtctgctgtccaccttcaccgaatacatcaagaacatcatcaacacctccatcctgaacctgcgttacgaatccaaccacctgatcgacctgtcccgttacgctagcaaaatcaacatcggctccaaagttaacttcgacccgatcgacaagaaccagatccagctgttcaacctggaatcctccaagattgaagttatcctgaagaacgcaattgtttacaactccatgtacgagaacttctccacctccttctggatccgtatcccgaaatacttcaactccatctccctgaacaacgaatacaccatcatcaactgcatggagaacaactccggctggaaagtttccctgaactacggcgaaatcatctggaccctgcaagacacccaggaaatcaaacagcgtgttgtttttaaatactcccagatgatcaacatctccgactacatcaaccgttggatcttcgttaccatcaccaacaaccgtctgaacaactccaaaatctacatcaacggccgtctgatcgaccagaaaccgatctccaacctgggcaacatccacgcttccaacaacatcatgttcaaactggacggctgccgtgacacccaccgttacatctggatcaaatacttcaacctgttcgacaaagaactgaacgagaaggaaatcaaagacctgtacgacaaccagtccaactccggcatcctgaaagacttctggggcgactacctgcaatatgacaaaccgtactacatgctgaacctgtacgacccgaacaaatacgttgacgttaacaacgttggcatccgtggctacatgtacctgaaaggcccgcgtggctccgttatgaccaccaacatctacctgaactcctccctgtaccgtggcaccaaattcatcatcaagaagtacgcttccggcaacaaagacaacatcgttcgtaacaacgaccgtgtttacatcaacgttgtagttaagaacaaagaataccgtctggctaccaacgcttcccaggctggcgttgagaagattctgtccgctctggaaatcccggacgttggcaacctgtcccaagttgtagttatgaaatccaagaacgaccagggcatcaccaacaagtgcaagatgaacctgcaagacaacaacggcaacgacatcggcttcatcggcttccaccagttcaacaacatcgctaaactggttgcttccaactggtacaaccgtcagatcgaacgttcctcccgtaccctgggctgctcctgggaattcatcccggttgacgacggctggggcgaacgtccgctgtaa

SEQ ID NO: 124 - DNA, 3891 bp, Artificial Sequence
  BoNT/A, E. coli-modified 3-3
atgccgttcgttaacaaacagttcaactacaaagacccggttaacggcgttgacatcgcttacatcaaaatcccgaacgctggccagatgcagccggttaaagcattcaagatccacaacaaaatctgggtaatcccggaacgtgacaccttcaccaacccggaagaaggcgacctgaacccgccgccggaagctaaacaggttccggtttcctactacgactccacctacctgagcaccgacaacgagaaggacaactacctgaaaggcgttaccaaactgttcgaacgtatctactccaccgacctgggccgtatgctgctgacctccatcgttcgtggcatcccgttctggggcggtagcaccatcgacaccgaactgaaagttatcgacaccaactgcatcaacgttatccagccggacggctcctaccgttccgaagaactgaacctggttatcatcggcccgtccgctgacatcatccagttcgaatgcaaatccttcggccacgaagttctgaacctgacccgtaacggctacggctccacccagtacatccgtttctccccggacttcaccttcggcttcgaagaatccctggaagttgacaccaacccgctgctgggcgctggcaaattcgctaccgacccggctgttaccctggctcacgaactgatccacgctggccaccgtctgtacggcatcgctatcaacccgaaccgtgttttcaaagttaacaccaacgcttactacgaaatgtccggcctggaagtttccttcgaagaactgcgtaccttcggcggccacgacgctaaattcatcgactccctgcaggagaacgaattccgtctgtactattacaacaaattcaaagacatcgcttccaccctgaacaaagctaaatccatcgttggcaccaccgcttccctgcagtacatgaagaacgttttcaaagagaagtacctgctgtccgaagacacctccggcaaattctccgttgacaaactgaaattcgacaaactgtacaagatgctgaccgaaatctacaccgaagacaacttcgttaaattcttcaaagttctgaaccgtaaaacctacctgaacttcgacaaagctgttttcaagatcaacatcgttccgaaagttaactacaccatctacgacggcttcaacctgcgtaacaccaacctggctgctaacttcaacggccagaacaccgaaatcaacaacatgaacttcaccaaactgaagaacttcaccggcctgttcgaattctacaaactgctgtgcgttcgtggcatcatcacctccaaaaccaaatccctggacaaaggctacaacaaagctctgaacgacctgtgcatcaaagttaacaactgggacctgttcttctctccgtccgaagacaacttcaccaacgacctgaacaaaggcgaagaaatcacctccgacaccaacatcgaagctgcagaagagaacatctccctggacctgatccagcagtactacctgaccttcaacttcgacaacgaaccggagaacatctccatcgagaacctgtcctccgacatcatcggccagctggaactgatgccgaacatcgaacgtttcccgaacggcaagaagtatgaactggacaaatacaccatgttccactacctgcgtgctcaggaattcgaacacggcaaatcccgtatcgctctgaccaactccgttaacgaagctctgctgaacccgtcccgtgtttacaccttcttctcctccgactacgttaagaaggttaacaaagctaccgaagctgctatgttcctgggctgggttgaacagctggtttacgacttcaccgacgaaacctccgaagtttccaccaccgacaagatcgctgacatcaccatcatcatcccgtacatcggtccggctctgaacatcggcaacatgctgtataaagacgacttcgttggcgctctgatcttctccggcgctgttatcctgctggaattcatcccggaaatcgctatcccggttctgggcaccttcgctctggtttcctacatcgctaacaaagttctgaccgttcagaccatcgacaacgctctgtccaaacgtaacgagaagtgggacgaagtttacaaatacatcgttaccaactggctggctaaagttaacacccagatcgacctgatccgtaagaagatgaaagaagctctggagaaccaggctgaagctaccaaagctatcatcaactaccagtacaaccagtacaccgaagaagagaagaacaacatcaacttcaacatcgacgacctgtcctccaaactgaacgaatccatcaacaaagctatgatcaacatcaacaaattcctgaaccagtgctccgtttcctacctgatgaactccatgatcccgtacggcgttaaacgtctggaagacttcgacgcttccctgaaagacgctctgctgaaatacatctacgacaaccgcggcaccctgatcggccaggttgaccgtctgaaagacaaagttaacaacaccctgtccaccgacatcccgttccagctgtccaaatacgtagacaaccagcgtctgctgtccaccttcaccgaatacatcaagaacatcatcaacacctccatcctgaacctgcgttacgaatccaaccacctgatcgacctgtcccgttacgctagcaagatcaacatcggctccaaagttaacttcgacccgatcgacaagaaccagatccagctgttcaacctggaatcctccaagatcgaagttatcctgaagaacgctatcgtttacaactccatgtacgagaacttctccacctccttctggatccgtatcccgaaatacttcaactccatctccctgaacaacgaatacaccatcatcaactgcatggaaaacaactccggctggaaagtttccctgaactacggcgaaatcatctggaccctgcaggacacccaggaaatcaaacagcgtgttgtttttaaatactcccagatgatcaacatctccgactacatcaaccgttggatcttcgttaccatcaccaacaaccgtctgaacaactccaagatctacatcaacggccgtctgatcgaccagaaaccgatctccaacctgggcaacatccacgcttccaacaacatcatgttcaaactggacggctgccgtgacacccaccgttacatctggatcaaatacttcaacctgttcgacaaagaactgaacgagaaggaaatcaaagacctgtacgacaaccagtccaactccggcatcctgaaagacttctggggcgactacctgcagtatgacaaaccgtactacatgctgaacctgtacgacccgaacaaatacgttgacgttaacaacgttggcatccgtggctacatgtacctgaaaggcccgcgtggctccgttatgaccaccaacatctacctgaactcctccctgtaccgtggcaccaaattcatcatcaagaagtacgcttccggcaacaaagacaacatcgttcgtaacaacgaccgtgtttacatcaacgttgtagttaagaacaaagaataccgtctggctaccaacgcttcccaggctggcgttgagaagatcctgtccgctctggaaatcccggacgtaggcaacctgtcccaggttgtagttatgaaatccaagaacgaccagggcatcaccaacaaatgcaaaatgaacctgcaggacaacaacggcaacgacatcggcttcatcggcttccaccagttcaacaacatcgctaaactggttgcttccaactggtacaaccgtcagatcgaacgttcctcccgtaccctgggctgctcctgggaattcatcccggttgacgacggctggggcgaacgtccgctgtaa

SEQ ID NO: 125 - DNA, 3891 bp, Artificial Sequence
  BoNT/A, E. coli-modified 4-3
atgccgttcgttaacaaacagttcaactacaaagacccggttaacggcgttgacatcgcttacatcaaaatcccgaacgctggccagatgcagccggttaaagcattcaagattcacaacaaaatctgggtaatcccggaacgtgacaccttcaccaacccggaagaaggcgacctgaacccgccgccggaagctaaacaggttccggtttcctactacgactccacctacctgtccaccgacaacgagaaggacaactacctgaaaggcgttaccaaactgttcgaacgtatctactccaccgacctgggccgtatgctgctgacctccatcgttcgtggcatcccgttctggggcggctccaccatcgacaccgaactgaaagttatcgacaccaactgcatcaacgttatccagccggacggctcctaccgttccgaagaactgaacctggttatcatcggcccgtccgctgacatcatccagttcgaatgcaaatccttcggccacgaagttctgaacctgacccgtaacggctacggctccacccagtacatccgtttctccccggacttcaccttcggcttcgaagaatccctggaagttgacaccaacccgctgctgggcgctggcaaattcgctaccgacccggctgttaccctggctcacgaactgatccacgctggccaccgtctgtacggcatcgctatcaacccgaaccgtgttttcaaagttaacaccaacgcttactacgaaatgtccggcctggaagtttccttcgaagaactgcgtaccttcggcggccacgacgctaaattcatcgactccctgcaagagaacgaattccgtctgtactattacaacaaattcaaagacatcgcttccaccctgaacaaagctaaatccatcgttggcaccaccgcttccctgcaatacatgaagaacgttttcaaagagaagtacctgctgtccgaagacacctccggcaaattctccgttgacaaactgaaattcgacaaactgtacaagatgctgaccgaaatctacaccgaagacaacttcgttaaattctttaaagttctgaaccgtaaaacctacctgaacttcgacaaagctgttttcaagattaacatcgttccgaaagttaactacaccatctacgacggcttcaacctgcgtaacaccaacctggctgctaacttcaacggccagaacaccgaaatcaacaacatgaacttcaccaaactgaagaacttcaccggtctgttcgaattctacaaactgctgtgcgtacgtggcatcatcacctccaaaaccaaatccctggacaaaggctacaacaaagctctgaacgacctgtgcatcaaagttaacaactgggacctgttcttctccccgtccgaagacaacttcaccaacgacctgaacaaaggcgaagaaatcacctccgacaccaacatcgaagctgctgaagagaacatctccctggacctgatccagcagtactacctgaccttcaacttcgacaacgaaccggagaacatctccatcgagaacctgtcctccgacatcatcggccagctggaactgatgccgaacatcgaacgtttcccgaacggcaagaagtatgaactggacaaatacaccatgttccactacctgcgtgctcaggaattcgaacacggcaaatcccgtatcgctctgaccaactccgttaacgaagctctgctgaacccgtcccgtgtttacaccttcttctcctccgactacgttaagaaggttaacaaagctaccgaagctgctatgttcctgggctgggttgaacagctggtttacgacttcaccgacgaaacctccgaagtttccaccaccgacaagattgctgacatcaccatcattatcccgtacatcggtccggctctgaacatcggcaacatgctgtataaagacgacttcgttggcgctctgatcttctccggcgctgttatcctgctggaattcatcccggaaatcgctatcccggttctgggcaccttcgctctggtttcctacatcgctaacaaagttctgaccgttcagaccatcgacaacgctctgtccaaacgtaacgagaagtgggacgaagtttacaaatacatcgttaccaactggctggctaaagttaacacccagatcgacctgatccgtaagaagatgaaagaagctctggagaaccaggctgaagctaccaaagctatcatcaactaccagtacaaccagtacaccgaagaggaaaagaacaacatcaacttcaacatcgacgacctgtcctccaaactgaacgaatccatcaacaaagctatgatcaacatcaacaaattcctgaaccagtgctccgtttcctacctgatgaactccatgatcccgtatggcgttaaacgtctggaagacttcgacgcgtccctgaaagacgctctgctgaaatacatctacgacaaccgcggcaccctgatcggccaggttgaccgtctgaaagacaaagttaacaacaccctgtccaccgacatcccgttccagctgtccaaatacgtagacaaccagcgtctgctgtccaccttcaccgaatacatcaagaacatcatcaacacctccatcctgaacctgcgttacgaatccaaccacctgatcgacctgtcccgttacgctagcaaaatcaacatcggctccaaagttaacttcgacccgatcgacaagaaccagatccagctgttcaacctggaatcctccaaaatcgaagttatcctgaagaacgcaattgtttacaactccatgtacgagaacttctccacctccttctggatccgtatcccgaaatacttcaactccatctccctgaacaacgaatacaccatcatcaactgcatggagaacaactccggctggaaagtttccctgaactacggcgaaatcatctggaccctgcaggacacccaggaaatcaaacagcgtgttgttttcaaatactcccagatgatcaacatctccgactacatcaaccgttggatcttcgttaccatcaccaacaaccgtctgaacaactccaaaatctacatcaacggccgtctgatcgaccagaaaccgatctccaacctgggcaacatccacgcttccaacaacatcatgttcaaactggacggctgccgtgacacccaccgttacatctggatcaaatacttcaacctgttcgacaaagaactgaacgagaaggaaatcaaagacctgtacgacaaccagtccaactccggcatcctgaaagacttctggggcgactacctgcaatatgacaaaccgtactacatgctgaacctgtacgacccgaacaaatacgttgacgttaacaacgttggcatccgtggctatatgtacctgaaaggcccgcgtggctccgttatgaccaccaacatctacctgaactcctccctgtaccgtggcaccaaattcatcatcaagaagtacgcttccggcaacaaagacaacatcgttcgtaacaacgaccgtgtttacatcaacgttgtagttaagaacaaagaataccgtctggctaccaacgcttcccaggctggcgttgagaagattctgtccgctctggaaatcccggacgttggcaacctgagccaagttgtagttatgaaatccaagaacgaccagggcatcaccaacaagtgcaagatgaacctgcaagacaacaacggcaacgacatcggcttcatcggcttccaccagttcaacaacatcgctaaactggttgcttccaactggtacaaccgtcagatcgaacgttcctcccgtaccctgggctgctcctgggaattcatcccggttgacgacggctggggcgaacgtccgctgtaa
